(19) United States
(12) Patent Application Publication
(10) Pub. No.: US 2025/0276001 A1
(43) Pub. Date: Sep. 4, 2025

(54) SERUM AMYLOID P COMPONENT (APCS) iRNA COMPOSITIONS AND METHODS OF USE THEREOF

(71) Applicant: Alnylam Pharmaceuticals, Inc., Cambridge, MA (US)

(72) Inventors: Kevin Fitzgerald, Brookline, MA (US); Gregory Hinkle, Plymouth, MA (US)

(21) Appl. No.: 18/907,649

(22) Filed: Oct. 7, 2024

Related U.S. Application Data
(63) Continuation of application No. 17/544,984, filed on Dec. 8, 2021, now abandoned.
Application No. 17/544,984 is a continuation of application No. 16/877,586, filed on May 19, 2020, now Pat. No. 11,229,663.
Application No. 16/877,586 is a continuation of application No. PCT/US2018/061906, filed on Nov. 20, 2018.
(60) Provisional application No. 62/588,506, filed on Nov. 20, 2017.

(51) Int. Cl. A61K 31/713; A61K 47/54; C12N 15/113

(52) U.S. Cl. CPC A61K 31/713; A61K 47/549; C12N 15/113; C12N 2310/14; C12N 2310/315; C12N 2310/3515

(57) ABSTRACT

The invention relates to iRNA, e.g., double stranded ribonucleic acid (dsRNA), compositions targeting the serum amyloid P component (APCS) gene, and methods of using such iRNA, e.g., dsRNA, compositions to inhibit expression of an APCS gene and to treat subjects having an APCS-associated disease, e.g., amyloidosis, Alzheimer's disease or coronary atherosclerotic heart disease.

### RELATED APPLICATIONS

[0001] This application is a continuation of U.S. patent application Ser. No. 17/544,984, filed on Dec. 8, 2021, which is a continuation of U.S. patent application Ser. No. 16/877,586, filed May 19, 2020, now U.S. Pat. No. 11,229,663, issued on Jan. 25, 2022, which is a 35 § U.S.C. 111(a) continuation application which claims the benefit of priority to PCT/US2018/061906, filed on Nov. 20, 2018, which claims the benefit of priority to U.S. Provisional Application No. 62/588,506, filed on Nov. 20, 2017. The entire contents of each of the foregoing applications are incorporated herein by reference.

### SEQUENCE LISTING

[0002] The instant application contains a Sequence Listing which has been submitted electronically in XML format and is hereby incorporated by reference in its entirety. Said XML copy, created on Dec. 13, 2024, is named 121301_06505_SL.xml and is 5,727,508 bytes in size.

### BACKGROUND OF THE INVENTION

[0003] Serum amyloid P component (SAP), also referred to as APCS or pentraxin-2 (PTX-2), is a 25 kDa pentameric protein that is identical to the amyloid P component (AP), but is located in the serum. In humans, SAP is encoded by the APCS gene (amyloid P component, serum). SAP is a glycoprotein that belongs to the pentraxin family of proteins, members of which have a characteristic pentameric organization.

[0004] Under normal conditions, SAP is thought to be synthesized and secreted only in hepatocytes and has a half-life of approximately 24 hours. In some diseases, SAP can also be generated by macrophages and smooth muscle cells such as in the atherosclerotic aortic intima.

[0005] SAP plays a role in protein aggregation and in regulating immune response, as illustrated in FIG. 1. SAP is best known as a constituent of in vivo pathological amyloid deposits. Amyloid deposits are inherently stable structures consisting of fibrils that are formed when normally soluble proteins assemble to form insoluble fibers predominantly composed of 3-sheet structures in a characteristic cross-0 conformation. The amyloid deposits are deposited extracellularly in the tissues and are thought to have a pathogenic effect.

[0006] SAP accounts for 14% of the dry mass of amyloid deposits. It can be found in all types of amyloid deposits, in the glomerula basement membranes and in elastic fibers in blood vessels, all of which are characterized by the ordered aggregation of normal globular proteins and peptides into insoluble fibers. SAP is thought to contribute to amyloid deposit formation by decorating and stabilizing protein aggregates, thereby preventing proteolytic cleavage and inhibiting fibril removal via the normal protein scavenging mechanisms (see Xi et al., Int. J. of Cardiol. 187, 20-26, 2015). SAP was also found to be present in atherosclerotic lesions and plasma levels of SAP were found to be positively associated with cardiovascular disease in the elderly. Further, it was recently demonstrated that SAP deficiency mitigated atherosclerotic lesions in a mouse model of atherosclerosis (Zheng et al., Atherosclerosis 244, 179-187, 2016). Thus, SAP may contribute to the pathogenesis of the diseases associated with amyloid deposits, e.g., amyloidosis and Alzheimer's disease, and cardiovascular diseases, e.g., atherosclerotic heart disease.

[0007] Amyloidosis is a rare, serious disease caused by accumulation of amyloid deposits within the extracellular space in the tissues of the body. The amyloid deposits disrupt the normal tissue architecture, damaging the function of tissues and organs and causing disease. In contrast to the normally efficient clearance of abnormal debris from the tissues, amyloid deposits are removed very slowly, if at all. There are many different types of amyloidoses, each caused by formation of amyloid fibrils from different soluble precursor proteins in different patients. About 30 different proteins are known to form amyloid fibrils in humans, and amyloidosis is named and classified according to the identity of the respective fibril protein. Amyloid deposits can be confined to only one part of the body or a single organ system in “local amyloidosis” or they can be widely distributed in organs and tissues throughout the body in “systemic amyloidosis”. The clinical manifestations of amyloidosis are accordingly highly variable and confirmation of the presence of amyloid in the tissues can be challenging, so that diagnosis is often delayed. Broad classification of amyloidosis includes primary (systemic AL) amyloidosis, secondary (systemic AA) amyloidosis, dialysis-related amyloidosis (DRA), familial (hereditary FA) amyloidosis, senile systemic amyloidosis (SSA) and organ-specific amyloidosis. Primary amyloidosis (AL) occurs without a known cause, but it has been seen in people with a blood cancer called multiple myeloma. This is the most common type of amyloidosis. “Systemic” means it affects the entire body, and the most commonly affected body parts are the kidney, heart, liver, intestines, and certain nerves. AL stands for “amyloid light chains,” which is the type of protein responsible for this type of amyloidosis. Secondary amyloidosis (AA) is is the result of another chronic inflammatory disease, such as lupus, rheumatoid arthritis, tuberculosis, inflammatory bowel disease (Crohn's disease and ulcerative colitis), and certain cancers. It most commonly affects the spleen, kidneys, liver, adrenal gland, and lymph nodes. AA means the amyloid type A protein causes this type of amyloidosis. Dialysis-related amyloidosis (DRA) is more common in older adults and people who have been on dialysis for more than 5 years. This form of amyloidosis is caused by deposits of beta-2 microglobulin that build up in the blood. Deposits can occur in many different tissues, but most commonly affects bones, joints, and tendons.

[0008] Familial, or hereditary, amyloidosis (AF) is a rare form that is passed down through families. It is caused by an abnormal amyloid transthyretin (TTR) protein, which is made in the liver. This protein is responsible for the most common forms of hereditary amyloidosis. Senile systemic amyloidosis (SSA) is caused deposits of normal TTR in the heart and other tissues. It occurs most commonly in older men. Organ-specific amyloidosis is caused by deposits of amyloid protein in single organs, including the skin (cutaneous amyloidosis).

[0009] Symptoms of amyloidosis may be varied and depend on the organ most affected by the deposition of amyloid fibrils. For example, symptoms of cardiac amyloidosis may include shortness of breath, an irregular heartbeat, signs of heart failure; symptoms of renal amyloidosis may include signs of renal failure and high levels of urinary proteins; and symptoms of gastrointestinal amyloidosis may include diarrhea, nausea, stomach pain, decreased appetite and weight loss.

[0010] There is no cure for amyloidosis. Several treatments may be used to slow the progression of the disease or to manage symptoms. Some of the treatments used to manage the symptoms of amyloidosis include chemotherapy, high-dose chemotherapy combined with stem cell transplant; steroids, liver, heart and kidney transplants and diuretics. It is therefore clear that new and effective treatment for amyloid-related diseases, e.g., amyloidosis, are needed.

[0011] Accordingly, there is a need in the art for therapies for subjects having a APCS-associated disease, e.g., amyloidosis, Alzheimer's disease, or a cardiovascular disease, e.g., atherosclerotic heart disease.

### SUMMARY OF THE INVENTION

[0012] The present invention provides iRNA compositions which effect the RNA-induced silencing complex (RISC)-mediated cleavage of RNA transcripts of an APCS gene. The APCS gene may be within a cell, e.g., a cell within a subject, such as a human. The use of these iRNA agents enables the selective targeted degradation of mRNAs of the corresponding gene (the APCS gene) in mammals.

[0013] The present invention also provides methods and combination therapies for treating a subject having a disease that would benefit from inhibiting or reducing the expression of an APCS gene, e.g., a APCS-associated disease. An APCS-associated disease may include an amyloid-associated disease, e.g., amyloidosis, such as primary (systemic AL) amyloidosis, secondary (systemic AA) amyloidosis, dialysis-related amyloidosis (DRA), familial (hereditary FA) amyloidosis, senile systemic amyloidosis (SSA) and organ-specific amyloidosis; Alzheimer's disease; diabetes mellitus type 2; Parkinson's disease; transmissible spongiform encephalopathy (such as bovine spongiform encephalopathy); fatal familial insomnia; Huntington's disease; medullary carcinoma of the thyroid; cardiac arrhythmias; isolated atrial amyloidosis; rheumatoid arthritis; aortic medial amyloid; prolactinoma; familial amyloid polyneuropathy; lattice corneal dystrophy; cerebral amyloid angiopathy; cerebral amyloid angiopathy (Icelandic type); sporadic inclusion body myositis; or a cardiovascular disease, e.g., coronary atherosclerotic heart disease.

[0014] Accordingly, in some embodiments, the present invention provides a double stranded ribonucleic acid (RNAi) agent for inhibiting expression of a serum amyloid P component (APCS) gene, comprising a sense strand and an antisense strand, wherein the sense strand comprises at least 15 contiguous nucleotides differing by no more than 3 nucleotides from the nucleotide sequence of SEQ ID NO:1, and the antisense strand comprises at least 15 contiguous nucleotides differing by no more than 3 nucleotides from the nucleotide sequence of SEQ ID NO:5.

[0015] In some embodiments, the present invention also provides a double stranded ribonucleic acid (RNAi) agent for inhibiting expression of a serum amyloid P component (APCS) gene, comprising a sense strand and an antisense strand, the antisense strand comprising a region of complementarity which comprises at least 15 contiguous nucleotides differing by no more than 3 nucleotides from any one of the antisense sequences listed in any one of Tables 3A, 3B, 4A, 4B, 6, and 7.

[0016] In some aspects, the present invention also provides a double stranded ribonucleic acid (RNAi) agent for inhibiting expression of a serum amyloid P component (APCS) gene, comprising a sense strand and an antisense strand, wherein the antisense strand comprises a region complementary to part of an mRNA encoding SAP, wherein each strand is about 14 to about 30 nucleotides in length, wherein the sense strand is represented by formula (I):

sense: 5′nₚ-Nₐ-(XXX)ᵢ-N_{b}-YYY-N_{b}-(ZZZ)ⱼ-Nₐ-n_{q}3′ (I)
[0017] wherein:
[0018] i and j are each independently 0 or 1;
[0019] p and q are each independently 0-6;
[0020] Nₐ represents an oligonucleotide sequence comprising 0-25 nucleotides which are either modified or unmodified or combinations thereof;
[0021] N_{b} represents an oligonucleotide sequence comprising 0-10 nucleotides which are either modified or unmodified or combinations thereof;
[0022] each nₚ and n_{q}, each of which may or may not be present, independently represents an overhang nucleotide;
[0023] XXX, YYY and ZZZ each independently represent one motif of three identical modifications on three consecutive nucleotides;
[0024] modifications on N_{b} differ from the modification on Y; and
[0025] wherein the sense strand is conjugated to at least one ligand.

[0026] In some embodiments, i is 0; j is 0; i is 1; j is 1; both i and j are 0; or both i and j are 1.

[0027] In some aspects, the YYY motif occurs at or near the cleavage site of the sense strand.

[0028] In a further embodiment, formula (I) is represented by formula (Ia):

sense: 5′nₚ-Nₐ-YYY-Nₐ-n_{q}3′ (Ia).

[0029] In some aspects of the invention, the sense strand comprises at least 15 contiguous nucleotides differing by no more than 3 nucleotides from the nucleotide sequence of nucleotides 61-83, 94-116, 163-185, 173-195, 194-216, 194-216, 197-219, 199-221, 204-226, 205-227, 237-259, 246-268, 258-280, 271-293, 309-331, 315-337, 316-338, 325-347, 326-348, 327-349, 328-350, 329-351, 330-352, 331-353, 332-354, 336-358, 338-360, 343-365, 353-375, 360-382, 364-386, 365-387, 371-393, 375-397, 380-402, 384-406, 387-409, 391-413, 395-417, 395-417, 396-418, 400-422, 403-425, 451-473, 455-477, 459-481, 527-549, 533-555, 536-558, 564-586, 651-673, 652-674, 653-675, 707-729, 708-730, 709-731, 710-732, 729-751, 734-756, 739-761, 778-800, 780-802, 784-806, 785-807, 793-815, 794-816, 796-818, 797-819, 798-820, 827-849, 852-874, 856-878, 858-880, 865-887, 866-888, 868-890, 870-892, 878-900, 881-903, 882-904, 883-905, 885-907, 911-933, 916-938 of SEQ ID NO: 1.

[0030] In some embodiments, the antisense strand comprises at least 15 contiguous nucleotides differing by no more than 3 nucleotides from the antisense nucleotide sequence of a duplex selected from the group consisting of AD-75708, AD-75723, AD-75694, AD-75692, AD-75664, AD-75664.2, AD-75679, AD-75659, AD-75662, AD-75680, AD-75687, AD-75657, AD-75699, AD-75727, AD-75731, AD-75728, AD-75737, AD-75696, AD-75718, AD-75676, AD-75663, AD-75669, AD-75666, AD-75735, AD-75686, AD-75736, AD-75674, AD-75717, AD-75706, AD-75719, AD-75688, AD-75734, AD-75724, AD-75711, AD-75703, AD-75721, AD-75712, AD-75697, AD-75726, AD-75730, AD-75732, AD-75733, AD-75729, AD-75685, AD-75673, AD-75691, AD-75670, AD-75739, AD-75738, AD-75722, AD-75714, AD-75681, AD-75668, AD-75693, AD-75677, AD-75690, AD-75716, AD-75682, AD-75720, AD-75725, AD-75695, AD-75665, AD-75661, AD-75658, AD-75700, AD-75698, AD-75672, AD-75684, AD-75667, AD-75678, AD-75660, AD-75701, AD-75707, AD-75675, AD-75671, AD-75683, AD-75689, AD-75715, AD-75705, AD-75704, AD-75713, AD-75702, AD-75709, AD-75710 as listed in Tables 3A, 3B, 4A and 4B.

[0031] In some embodiments, the sense strand comprises at least 15 contiguous nucleotides differing by no more than 3 nucleotides from the nucleotide sequence of nucleotides 53-71; 68-86; 82-100; 90-108; 104-122; 118-136; 132-150; 148-166; 162-180; 170-188; 185-203; 200-218; 214-232; 228-246; 242-260; 248-266; 277-295; 283-301; 294-312; 309-327; 323-341; 352-370; 366-384; 377-395; 385-403; 461-479; 476-494; 491-509; 505-523; 750-768; 758-776; 773-791; 787-805; 854-872; 869-887; or 878-896 of SEQ ID NO: 1.

[0032] In other embodiments, the antisense strand comprises at least 15 contiguous nucleotides differing by no more than 3 nucleotides from the antisense nucleotide sequence of a duplex selected from the group consisting of AD-77752; AD-77753; AD-77754; AD-77755; AD-77756; AD-77757; AD-77758; AD-77759; AD-77760; AD-77761; AD-77762; AD-77763; AD-77764; AD-77765; AD-77766; AD-77767; AD-77769; AD-77770; AD-77771; AD-77772; AD-77773; AD-77775; AD-77776; AD-77777; AD-77778; AD-77783; AD-77784; AD-77785; AD-77786; AD-77804; AD-77805; AD-77806; AD-77807; AD-77812; AD-77813; and AD-77814 as listed in Tables 6 and 7.

[0033] In some embodiments, the sense and antisense strands comprise nucleotide sequences selected from any of the nucleotide sequences in any one of Tables 3A, 3B, 4A, 4B, 6, and 7.

[0034] In some embodiments, the sense and antisense strands consist of nucleotide sequences selected from any of the nucleotide sequences in any one of Tables 3A, 3B, 4A, 4B, 6, and 7.

[0035] In some embodiments, the double stranded RNAi agent comprises at least one modified nucleotide. In some aspects, substantially all of the nucleotides of the sense strand are modified nucleotides; substantially all of the nucleotides of the antisense strand are modified nucleotides; or substantially all of the nucleotides of the sense strand and substantially all of the nucleotides of the antisense strand are modified nucleotides. In a further aspect, all of the nucleotides of the sense strand are modified nucleotides; all of the nucleotides of the antisense strand are modified nucleotides; or all of the nucleotides of the sense strand and all of the nucleotides of the antisense strand are modified nucleotides.

[0036] In some embodiments, at least one of said modified nucleotides is selected from the group consisting of a deoxy-nucleotide, a 3′-terminal deoxy-thymine (dT) nucleotide, a 2′-O-methyl modified nucleotide, a 2′-fluoro modified nucleotide, a 2′-deoxy-modified nucleotide, a locked nucleotide, an unlocked nucleotide, a conformationally restricted nucleotide, a constrained ethyl nucleotide, an abasic nucleotide, a 2′-amino-modified nucleotide, a 2′-O-allyl-modified nucleotide, 2′-C-alkyl-modified nucleotide, 2′-hydroxyl-modified nucleotide, a 2′-methoxyethyl modified nucleotide, a 2′-O-alkyl-modified nucleotide, a morpholino nucleotide, a 5′-vinyl phosphate, a phosphoramidate, a non-natural base comprising nucleotide, a tetrahydropyran modified nucleotide, a 1,5-anhydrohexitol modified nucleotide, a cyclohexenyl modified nucleotide, a nucleotide comprising a phosphorothioate group, a nucleotide comprising a methylphosphonate group, a nucleotide comprising a 5′-phosphate, and a nucleotide comprising a 5′-phosphate mimic. For example, at least one of the modified nucleotides is selected from the group consisting of a 2′-O-methyl modification, a 2′fluoro modification, a 5′-vinyl phosphate, and a 3′-terminal deoxy-thymine (dT) nucleotide.

[0037] In one aspect, the double stranded RNAi agent of the invention comprises at least one phosphorothioate internucleotide linkage.

[0038] In some embodiments, the region of complementarity between the sense strand and the antisense strand is at least 17 nucleotides in length, e.g., 19 to 30 nucleotides in length; 21 nucleotides in length; 21 to 23 nucleotides in length; 19 nucleotides in length, or no more than 30 nucleotides in length.

[0039] In some aspects, each strand is independently 19-30 nucleotides in length, e.g., 19-25 nucleotides in length.

[0040] In one embodiment, the sense strand has a total of 21 nucleotides and the antisense strand has a total of 23 nucleotides.

[0041] In some aspects, the at least one strand comprises a 3′ overhang of at least 1 nucleotide or at least 2 nucleotides.

[0042] In some embodiments, the double stranded RNAi agent of the invention further comprises a ligand. In a further embodiment, the ligand is conjugated to the 3′ end of the sense strand of the double stranded RNAi agent. In one embodiment, the ligand is an N-acetylgalactosamine (GalNAc) derivative, e.g., the ligand is

[chemical structure]

[0043] In an embodiment, the double stranded RNAi agent of the invention is conjugated to the ligand as shown in the following schematic

[chemical structure]

[0044] and wherein X is O or S. In one embodiment, the X is O.

[0045] In some aspects, the double stranded RNAi agent is selected from the group consisting of of any one of the agents listed in any one of Tables 3A, 3B, 4A, 4B, 6, and 7.

[0046] In some aspects, the present invention also provides a cell containing the double stranded RNAi agent of the invention and a vector encoding at least one strand of the double stranded RNAi agent of the invention.

[0047] In other aspects, the present invention also provides a pharmaceutical composition for inhibiting expression of a serum amyloid P component (APCS) gene comprising the double stranded RNAi agent of the invention. In some embodiments, the RNAi agent is in an unbuffered solution, e.g., in saline or water. In other embodiments, the RNAi agent is with a buffer solution, e.g., a buffer solution comprising acetate, citrate, prolamine, carbonate, or phosphate or any combination thereof. In a specific embodiment, the buffer solution is phosphate buffered saline (PBS).

[0048] In some embodiments, the present invention also provides a method of inhibiting expression of a serum amyloid P component (APCS) gene in a cell. The method includes contacting the cell with an RNAi agent of the invention or a pharmaceutical composition of the invention, thereby inhibiting expression of the SAP gene in the cell. In one aspect, the cell is within a subject. In one aspect, the subject is a human.

[0049] In some embodiments, the APCS expression is inhibited by at least 30%, 40%, 50%, 60%, 70%, 80%, 90%, 95%, or to below the level of detection of APCS expression.

[0050] In one embodiments, the human suffers from an APCS-associated disease, e.g., a disease selected from the group consisting of amyloidosis, Alzheimer's disease, diabetes mellitus type 2, Parkinson's disease, transmissible spongiform encephalopathy, fatal familial insomnia, Huntington's disease, medullary carcinoma of the thyroid, cardiac arrhythmias, isolated atrial amyloidosis, rheumatoid arthritis, aortic medial amyloid, prolactinoma, familial amyloid polyneuropathy, lattice corneal dystrophy, cerebral amyloid angiopathy, cerebral amyloid angiopathy (Icelandic type), sporadic inclusion body myositis, and a cardiovascular disease.

[0051] In one aspect, the present invention provides a method of treating a subject having a disease that would benefit from reduction in serum amyloid P component (APCS) gene expression. The method includes administering to the subject a therapeutically effective amount of the double stranded RNAi agent of the invention, or a pharmaceutical composition of the invention, thereby treating the subject.

[0052] In another aspect, the present invention also provides a method of preventing at least one symptom in a subject having a disease that would benefit from reduction in serum amyloid P component (APCS) gene expression. The method includes administering to the subject a therapeutically effective amount of the double stranded RNAi agent of the invention, or a pharmaceutical composition of the invention, thereby preventing at least one symptom in the subject having a disease that would benefit from reduction in APCS expression.

[0053] In some embodiments, the disease is a APCS-associated disease, e.g., a disease selected from the group consisting of amyloidosis, Alzheimer's disease, diabetes mellitus type 2, Parkinson's disease, transmissible spongiform encephalopathy, fatal familial insomnia Huntington's disease, medullary carcinoma of the thyroid, cardiac arrhythmias, isolated atrial amyloidosis, rheumatoid arthritis, aortic medial amyloid, prolactinoma, familial amyloid polyneuropathy, lattice corneal dystrophy, cerebral amyloid angiopathy, cerebral amyloid angiopathy (Icelandic type), sporadic inclusion body myositis and a cardiovascular disease.

[0054] In one embodiment, the subject is a human.

[0055] In some embodiments, the administration of the RNAi agent to the subject causes a decrease in plasma levels of SAP protein. In other embodiments, the administration of the RNAi agent to the subject causes a decrease in amyloid load in the subject.

[0056] In some aspects, the RNAi agent is administered to the subject at a dose of about 0.01 mg/kg to about 10 mg/kg or about 0.5 mg/kg to about 50 mg/kg. In other aspects, the RNAi agent is administered to the subject subcutaneously or intravenously.

[0057] In some embodiments, the methods of the invention further comprise administering CPHPC and/or an anti-SAP antibody, or antigen-binding fragment there, to the subject.

[0058] In one aspect, the present invention also provides a method of inhibiting the expression of an APCS protein (SAP) in a subject. The method includes administering to the subject a therapeutically effective amount of the double stranded RNAi agent of the invention or a pharmaceutical composition of the invention, thereby inhibiting the expression of APCS in the subject.

### BRIEF DESCRIPTION OF THE DRAWINGS

[0059] FIG. 1 is a schematic overview of the major functions of serum amyloid P component (SAP).

### DETAILED DESCRIPTION OF THE INVENTION

[0060] The present invention provides iRNA compositions, which selectively effect the RNA-induced silencing complex (RISC)-mediated cleavage of RNA transcripts of an APCS gene. The gene may be within a cell, e.g., a cell within a subject, such as a human. The use of these iRNAs enables the selective targeted degradation of mRNAs of the APCS gene in mammals.

[0061] The RNAi agents of the invention have been designed to potently and selectively target the corresponding human APCS gene. Without intending to be limited by theory, it is believed that a combination or sub-combination of the foregoing properties and the specific target sites and/or the specific modifications in these RNAi agents confer to the RNAi agents of the invention improved efficacy, stability, potency, durability, and safety.

[0062] The iRNAs of the invention may include an RNA strand (the antisense strand) having a region which is about 30 nucleotides or less in length, e.g., 15-30, 15-29, 15-28, 15-27, 15-26, 15-25, 15-24, 15-23, 15-22, 15-21, 15-20, 15-19, 15-18, 15-17, 18-30, 18-29, 18-28, 18-27, 18-26, 18-25, 18-24, 18-23, 18-22, 18-21, 18-20, 19-30, 19-29, 19-28, 19-27, 19-26, 19-25, 19-24, 19-23, 19-22, 19-21, 19-20, 20-30, 20-29, 20-28, 20-27, 20-26, 20-25, 20-24, 20-23, 20-22, 20-21, 21-30, 21-29, 21-28, 21-27, 21-26, 21-25, 21-24, 21-23, or 21-22 nucleotides in length, which region is substantially complementary to at least part of an mRNA transcript of a human APCS gene.

[0063] In certain embodiments, the iRNAs of the invention include an RNA strand (the antisense strand) which can include longer lengths, for example up to 66 nucleotides, e.g., 36-66, 26-36, 25-36, 31-60, 22-43, 27-53 nucleotides in length with a region of at least 19 contiguous nucleotides that is substantially complementary to at least a part of an mRNA transcript of a APCS gene. These iRNAs with the longer length antisense strands preferably include a second RNA strand (the sense strand) of 20-60 nucleotides in length wherein the sense and antisense strands form a duplex of 18-30 contiguous nucleotides.

[0064] It is believed that iRNAs targeting an APCS gene can potently mediate RNAi, resulting in significant inhibition of expression of an APCS gene. Thus, methods and compositions including these iRNAs are useful for treating a subject having a APCS-associated disease or disorder, e.g., amyloidosis, Alzheimer's disease or coronary atherosclerotic heart disease.

[0065] Accordingly, the present invention provides methods and combination therapies for treating a subject having a disorder that would benefit from inhibiting or reducing the expression of a APCS gene, e.g., a APCS-associated disease, such as amyloidosis, Alzheimer's disease or coronary atherosclerotic heart disease, using iRNA compositions which effect the RNA-induced silencing complex (RISC)-mediated cleavage of RNA transcripts of a APCS gene.

[0066] The present invention also provides methods for ameliorating and/or preventing at least one symptom e.g., a symptom associated with formation and/or deposition of amyloid deposits or atherosclerotic lesions, in a subject having a disorder that would benefit from inhibiting or reducing the expression of an APCS gene, e.g., a APCS-associated disease, such as amyloidosis, Alzheimer's disease or coronary atherosclerotic heart disease.

[0067] The following detailed description discloses how to make and use compositions containing iRNAs to inhibit the expression of an APCS gene, as well as compositions, uses, and methods for treating subjects having diseases and disorders that would benefit from inhibition and/or reduction of the expression of an APCS gene.

### I. Definitions

[0068] In order that the present invention may be more readily understood, certain terms are first defined. In addition, it should be noted that whenever a value or range of values of a parameter are recited, it is intended that values and ranges intermediate to the recited values are also intended to be part of this invention.

[0069] The articles “a” and “an” are used herein to refer to one or to more than one (i.e., to at least one) of the grammatical object of the article. By way of example, “an element” means one element or more than one element, e.g., a plurality of elements.

[0070] The term “including” is used herein to mean, and is used interchangeably with, the phrase “including but not limited to”.

[0071] The term “or” is used herein to mean, and is used interchangeably with, the term “and/or,” unless context clearly indicates otherwise.

[0072] The term “about” is used herein to mean within the typical ranges of tolerances in the art. For example, “about” can be understood as within about 2 standard deviations from the mean. In certain embodiments, about means ±10%, 9%, 8%, 7%, 6%, 5%, 4%, 3%, 2% or ±1%. When “about” is present before a series of numbers or a range, it is understood that “about” can modify each of the numbers in the series or range.

[0073] The term “at least” prior to a number or series of numbers is understood to include the number adjacent to the term “at least”, and all subsequent numbers or integers that could logically be included, as clear from context. For example, the number of nucleotides in a nucleic acid molecule must be an integer. For example, “at least 18 nucleotides of a 21 nucleotide nucleic acid molecule” means that 18, 19, 20, or 21 nucleotides have the indicated property. When at least is present before a series of numbers or a range, it is understood that “at least” can modify each of the numbers in the series or range.

[0074] As used herein, “no more than” or “less than” is understood as the value adjacent to the phrase and logical lower values or integers, as logical from context, to zero. For example, a duplex with an overhang of “no more than 2 nucleotides” has a 2, 1, or 0 nucleotide overhang. When “no more than” is present before a series of numbers or a range, it is understood that “no more than” can modify each of the numbers in the series or range. As used herein, ranges include both the upper and lower limit.

[0075] As used herein, the term “Homo sapiens amyloid P component, serum”, used interchangeably with the term “APCS,” refers to the well-known gene and polypeptide, also known in the art as SAP. The term “APCS” includes human APCS, the amino acid and nucleotide sequence of which may be found in, for example, GenBank Accession No. NM_001639 (GI:206597534) (SEQ ID NO: 1); cynomolgus monkey APCS, the amino acid and nucleotide sequence of which may be found in, for example, GenBank Accession No. XM_005541312 (GI:982224943) (SEQ ID NO: 2); mouse APCS, the amino acid and nucleotide sequence of which may be found in, for example, GenBank Accession No. NM_011318 (GI:226958496) (SEQ ID NO: 3); and rat APCS, the amino acid and nucleotide sequence of which may be found in, for example, GenBank Accession No. NM_017170 (GI:148747487) (SEQ ID NO: 4).

[0076] The term “APCS,” as used herein, also refers to naturally occurring DNA sequence variations of the APCS gene. Numerous sequence variations within the APCS gene have been identified and may be found at, for example, NCBI dbSNP and UniProt (see, e.g., http://www.ncbi.nlm.nih.gov/gene/325, the entire contents of which is incorporated herein by reference as of the date of filing this application.

[0077] As used herein, “target sequence” refers to a contiguous portion of the nucleotide sequence of an mRNA molecule formed during the transcription of a APCS gene, including mRNA that is a product of RNA processing of a primary transcription product. In one embodiment, the target portion of the sequence will be at least long enough to serve as a substrate for iRNA-directed cleavage at or near that portion of the nucleotide sequence of an mRNA molecule formed during the transcription of an APCS gene. In one embodiment, the target sequence is within the protein coding region of an APCS gene. In another embodiment, the target sequence is within the 3′ UTR of an APCS gene.

[0078] The target sequence may be from about 9-36 nucleotides in length, e.g., about 15-30 nucleotides in length. For example, the target sequence can be from about 15-30 nucleotides, 15-29, 15-28, 15-27, 15-26, 15-25, 15-24, 15-23, 15-22, 15-21, 15-20, 15-19, 15-18, 15-17, 18-30, 18-29, 18-28, 18-27, 18-26, 18-25, 18-24, 18-23, 18-22, 18-21, 18-20, 19-30, 19-29, 19-28, 19-27, 19-26, 19-25, 19-24, 19-23, 19-22, 19-21, 19-20, 20-30, 20-29, 20-28, 20-27, 20-26, 20-25, 20-24, 20-23, 20-22, 20-21, 21-30, 21-29, 21-28, 21-27, 21-26, 21-25, 21-24, 21-23, or 21-22 nucleotides in length. In some embodiments, the target sequence is about 19 to about 30 nucleotides in length. In other embodiments, the target sequence is about 19 to about 25 nucleotides in length. In still other embodiments, the target sequence is about 19 to about 23 nucleotides in length. In some embodiments, the target sequence is about 21 to about 23 nucleotides in length. Ranges and lengths intermediate to the above recited ranges and lengths are also contemplated to be part of the invention.

[0079] As used herein, the term “strand comprising a sequence” refers to an oligonucleotide comprising a chain of nucleotides that is described by the sequence referred to using the standard nucleotide nomenclature.

[0080] A “nucleoside” is a base-sugar combination. The “nucleobase” (also known as “base”) portion of the nucleoside is normally a heterocyclic base moiety. “Nucleotides” are nucleosides that further include a phosphate group covalently linked to the sugar portion of the nucleoside. For those nucleosides that include a pentofuranosyl sugar, the phosphate group can be linked to the 2′, 3′ or 5′ hydroxyl moiety of the sugar.

[0081] “G,” “C,” “A,” “T” and “U” each generally stand for a nucleotide that contains guanine, cytosine, adenine, thymidine and uracil as a base, respectively. However, it will be understood that the term “ribonucleotide” or “nucleotide” can also refer to a modified nucleotide, as further detailed below, or a surrogate replacement moiety (see, e.g., Table 2). The skilled person is well aware that guanine, cytosine, adenine, and uracil can be replaced by other moieties without substantially altering the base pairing properties of an oligonucleotide comprising a nucleotide bearing such replacement moiety. For example, without limitation, a nucleotide comprising inosine as its base can base pair with nucleotides containing adenine, cytosine, or uracil. Hence, nucleotides containing uracil, guanine, or adenine can be replaced in the nucleotide sequences of dsRNA featured in the invention by a nucleotide containing, for example, inosine. In another example, adenine and cytosine anywhere in the oligonucleotide can be replaced with guanine and uracil, respectively to form G-U Wobble base pairing with the target mRNA. Sequences containing such replacement moieties are suitable for the compositions and methods featured in the invention.

[0082] “Polynucleotides,” also referred to as “oligonucleotides,” are formed through the covalent linkage of adjacent nucleosides to one another, to form a linear polymeric oligonucleotide. Within the polynucleotide structure, the phosphate groups are commonly referred to as forming the internucleoside linkages of the polynucleotide.

[0083] The terms “iRNA,” “RNAi agent,” “iRNA agent,” “RNA interference agent” as used interchangeably herein, refer to an agent that contains RNA as that term is defined herein, and which mediates the targeted cleavage of an RNA transcript via an RNA-induced silencing complex (RISC) pathway. iRNA directs the sequence-specific degradation of mRNA through a process known as RNA interference (RNAi). The iRNA modulates, e.g., inhibits, the expression of an APCS gene in a cell, e.g., a cell within a subject, such as a mammalian subject.

[0084] In one embodiment, an RNAi agent of the invention includes a single stranded RNAi that interacts with a target RNA sequence, e.g., an APCS target mRNA sequence, to direct the cleavage of the target RNA. Without wishing to be bound by theory it is believed that long double stranded RNA introduced into cells is broken down into double stranded short interfering RNAs (siRNAs) comprising a sense strand and an antisense strand by a Type III endonuclease known as Dicer (Sharp et al. (2001) Genes Dev. 15:485). Dicer, a ribonuclease-III-like enzyme, processes these dsRNA into 19-23 base pair short interfering RNAs with characteristic two base 3′ overhangs (Bernstein, et al., (2001) Nature 409:363). These siRNAs are then incorporated into an RNA-induced silencing complex (RISC) where one or more helicases unwind the siRNA duplex, enabling the complementary antisense strand to guide target recognition (Nykanen, et al., (2001) Cell 107:309). Upon binding to the appropriate target mRNA, one or more endonucleases within the RISC cleave the target to induce silencing (Elbashir, et al., (2001) Genes Dev. 15:188). Thus, in one aspect the invention relates to a single stranded RNA (ssRNA) (the antisense strand of an siRNA duplex) generated within a cell and which promotes the formation of a RISC complex to effect silencing of the target gene, i.e., an APCS gene. Accordingly, the term “siRNA” is also used herein to refer to an RNAi as described above.

[0085] In another embodiment, the RNAi agent may be a single-stranded RNA that is introduced into a cell or organism to inhibit a target mRNA. Single-stranded RNAi agents bind to the RISC endonuclease, Argonaute 2, which then cleaves the target mRNA. The single-stranded siRNAs are generally 15-30 nucleotides and are chemically modified. The design and testing of single-stranded RNAs are described in U.S. Pat. No. 8,101,348 and in Lima et al., (2012) Cell 150: 883-894, the entire contents of each of which are hereby incorporated herein by reference. Any of the antisense nucleotide sequences described herein may be used as a single-stranded siRNA as described herein or as chemically modified by the methods described in Lima et al., (2012) Cell 150:883-894.

[0086] In another embodiment, an “iRNA” for use in the compositions, uses, and methods of the invention is a double stranded RNA and is referred to herein as a “double stranded RNAi agent,” “double stranded RNA (dsRNA) molecule,” “dsRNA agent,” or “dsRNA”. The term “dsRNA” refers to a complex of ribonucleic acid molecules, having a duplex structure comprising two anti-parallel and substantially complementary nucleic acid strands, referred to as having “sense” and “antisense” orientations with respect to a target RNA, i.e., an APCS gene. In some embodiments of the invention, a double stranded RNA (dsRNA) triggers the degradation of a target RNA, e.g., an mRNA, through a post-transcriptional gene-silencing mechanism referred to herein as RNA interference or RNAi.

[0087] In general, the majority of nucleotides of each strand of a dsRNA molecule are ribonucleotides, but as described in detail herein, each or both strands can also include one or more non-ribonucleotides, e.g., a deoxyribonucleotide and/or a modified nucleotide. In addition, as used in this specification, an “RNAi agent” may include ribonucleotides with chemical modifications. Such modifications may include all types of modifications disclosed herein or known in the art. Ant such modification, as used in an RNAi agent are encompassed by iRNA for the purposes of the specification and claims. In some embodiments, an RNAi agent includes substantial modifications at multiple nucleotides.

[0088] As used herein, the term “modified nucleotide” refers to a nucleotide having, independently, a modified sugar moiety, a modified internucleotide linkage, and/or a modified nucleobase. Thus, the term modified nucleotide encompasses substitutions, additions or removal of, e.g., a functional group or atom, to internucleoside linkages, sugar moieties, or nucleobases. The modifications suitable for use in the agents of the invention include all types of modifications disclosed herein or known in the art. Any such modifications, as used in a siRNA type molecule, are encompassed by “RNAi agent” for the purposes of this specification and claims.

[0089] The duplex region may be of any length that permits specific degradation of a desired target RNA through a RISC pathway, and may range from about 9 to 36 base pairs in length, e.g., about 15-30 base pairs in length, for example, about 9, 10, 11, 12, 13, 14, 15, 16, 17, 18, 19, 20, 21, 22, 23, 24, 25, 26, 27, 28, 29, 30, 31, 32, 33, 34, 35, or 36 base pairs in length, such as about 15-30, 15-29, 15-28, 15-27, 15-26, 15-25, 15-24, 15-23, 15-22, 15-21, 15-20, 15-19, 15-18, 15-17, 18-30, 18-29, 18-28, 18-27, 18-26, 18-25, 18-24, 18-23, 18-22, 18-21, 18-20, 19-30, 19-29, 19-28, 19-27, 19-26, 19-25, 19-24, 19-23, 19-22, 19-21, 19-20, 20-30, 20-29, 20-28, 20-27, 20-26, 20-25, 20-24, 20-23, 20-22, 20-21, 21-30, 21-29, 21-28, 21-27, 21-26, 21-25, 21-24, 21-23, or 21-22 base pairs in length. Ranges and lengths intermediate to the above recited ranges and lengths are also contemplated to be part of the invention.

[0090] The two strands forming the duplex structure may be different portions of one larger RNA molecule, or they may be separate RNA molecules. Where the two strands are part of one larger molecule, and therefore are connected by an uninterrupted chain of nucleotides between the 3′-end of one strand and the 5′-end of the respective other strand forming the duplex structure, the connecting RNA chain is referred to as a “hairpin loop.” A hairpin loop can comprise at least one unpaired nucleotide. In some embodiments, the hairpin loop can comprise at least 2, at least 3, at least 4, at least 5, at least 6, at least 7, at least 8, at least 9, at least 10, at least 20, at least 23 or more unpaired nucleotides. In some embodiments, the hairpin loop can be 10 or fewer nucleotides. In some embodiments, the hairpin loop can be 8 or fewer unpaired nucleotides. In some embodiments, the hairpin loop can be 4-10 unpaired nucleotides. In some embodiments, the hairpin loop can be 4-8 nucleotides.

[0091] Where the two substantially complementary strands of a dsRNA are comprised of separate RNA molecules, those molecules need not, but can be covalently connected. Where the two strands are connected covalently by means other than an uninterrupted chain of nucleotides between the 3′-end of one strand and the 5′-end of the respective other strand forming the duplex structure, the connecting structure is referred to as a “linker.” The RNA strands may have the same or a different number of nucleotides. The maximum number of base pairs is the number of nucleotides in the shortest strand of the dsRNA minus any overhangs that are present in the duplex. In addition to the duplex structure, an RNAi may comprise one or more nucleotide overhangs. In one embodiment of the RNAi agent, at least one strand comprises a 3′ overhang of at least 1 nucleotide. In another embodiment, at least one strand comprises a 3′ overhang of at least 2 nucleotides, e.g., 2, 3, 4, 5, 6, 7, 9, 10, 11, 12, 13, 14, or 15 nucleotides. In other embodiments, at least one strand of the RNAi agent comprises a 5′ overhang of at least 1 nucleotide. In certain embodiments, at least one strand comprises a 5′ overhang of at least 2 nucleotides, e.g., 2, 3, 4, 5, 6, 7, 9, 10, 11, 12, 13, 14, or 15 nucleotides. In still other embodiments, both the 3′ and the 5′ end of one strand of the RNAi agent comprise an overhang of at least 1 nucleotide.

[0092] In one embodiment, an RNAi agent of the invention is a dsRNA agent, each strand of which comprises 19-23 nucleotides that interacts with a target RNA sequence, i.e., an APCS target mRNA sequence, to direct the cleavage of the target RNA. Without wishing to be bound by theory, long double stranded RNA introduced into cells is broken down into siRNA by a Type III endonuclease known as Dicer (Sharp et al. (2001) Genes Dev. 15:485). Dicer, a ribonuclease-III-like enzyme, processes the dsRNA into 19-23 base pair short interfering RNAs with characteristic two base 3′ overhangs (Bernstein, et al., (2001) Nature 409:363). The siRNAs are then incorporated into an RNA-induced silencing complex (RISC) where one or more helicases unwind the siRNA duplex, enabling the complementary antisense strand to guide target recognition (Nykanen, et al., (2001) Cell 107:309). Upon binding to the appropriate target mRNA, one or more endonucleases within the RISC cleave the target to induce silencing (Elbashir, et al., (2001) Genes Dev. 15:188). In one embodiment, an RNAi agent of the invention is a dsRNA of 24-30 nucleotides that interacts with a target RNA sequence, i.e., an APCS target mRNA sequence, to direct the cleavage of the target RNA.

[0093] As used herein, the term “nucleotide overhang” refers to at least one unpaired nucleotide that protrudes from the duplex structure of an iRNA, e.g., a double-stranded RNA (dsRNA). For example, when a 3′-end of one strand of a dsRNA extends beyond the 5′-end of the other strand, or vice versa, there is a nucleotide overhang. A dsRNA can comprise an overhang of at least one nucleotide; alternatively the overhang can comprise at least two nucleotides, at least three nucleotides, at least four nucleotides, at least five nucleotides or more. A nucleotide overhang can comprise or consist of a nucleotide/nucleoside analog, including a deoxynucleotide/nucleoside. The overhang(s) can be on the sense strand, the antisense strand or any combination thereof. Furthermore, the nucleotide(s) of an overhang can be present on the 5′-end, 3′-end or both ends of either an antisense or sense strand of a dsRNA. In one embodiment of the dsRNA, at least one strand comprises a 3′ overhang of at least 1 nucleotide. In another embodiment, at least one strand comprises a 3′ overhang of at least 2 nucleotides, e.g., 2, 3, 4, 5, 6, 7, 9, 10, 11, 12, 13, 14, or 15 nucleotides. In other embodiments, at least one strand of the RNAi agent comprises a 5′ overhang of at least 1 nucleotide. In certain embodiments, at least one strand comprises a 5′ overhang of at least 2 nucleotides, e.g., 2, 3, 4, 5, 6, 7, 9, 10, 11, 12, 13, 14, or 15 nucleotides. In still other embodiments, both the 3′ and the 5′ end of one strand of the RNAi agent comprise an overhang of at least 1 nucleotide.

[0094] In certain embodiments, the antisense strand of a dsRNA has a 1-10 nucleotide, e.g., 0-3, 1-3, 2-4, 2-5, 4-10, 5-10, e.g., a 1, 2, 3, 4, 5, 6, 7, 8, 9, or 10 nucleotide, overhang at the 3′-end and/or the 5′-end. In one embodiment, the sense strand of a dsRNA has a 1-10 nucleotide, e.g., a 1, 2, 3, 4, 5, 6, 7, 8, 9, or 10 nucleotide, overhang at the 3′-end and/or the 5′-end. In another embodiment, one or more of the nucleotides in the overhang is replaced with a nucleoside thiophosphate.

[0095] In certain embodiments, the overhang on the sense strand or the antisense strand, or both, can include extended lengths longer than 10 nucleotides, e.g., 1-30 nucleotides, 2-30 nucleotides, 10-30 nucleotides, or 10-15 nucleotides in length. In certain embodiments, an extended overhang is on the sense strand of the duplex. In certain embodiments, an extended overhang is present on the 3′ end of the sense strand of the duplex. In certain embodiments, an extended overhang is present on the 5′ end of the sense strand of the duplex. In certain embodiments, an extended overhang is on the antisense strand of the duplex. In certain embodiments, an extended overhang is present on the 3′ end of the antisense strand of the duplex. In certain embodiments, an extended overhang is present on the 5′ end of the antisense strand of the duplex. In certain embodiments, one or more of the nucleotides in the overhang is replaced with a nucleoside thiophosphate. In certain embodiments, the overhang includes a self-complementary portion such that the overhang is capable of forming a hairpin structure that is stable under physiological conditions.

[0096] “Blunt” or “blunt end” means that there are no unpaired nucleotides at that end of the double stranded RNAi agent, i.e., no nucleotide overhang. A “blunt ended” RNAi agent is a dsRNA that is double stranded over its entire length, i.e., no nucleotide overhang at either end of the molecule. The RNAi agents of the invention include RNAi agents with nucleotide overhangs at one end (i.e., agents with one overhang and one blunt end) or with nucleotide overhangs at both ends.

[0097] The term “antisense strand” or “guide strand” refers to the strand of an iRNA, e.g., a dsRNA, which includes a region that is substantially complementary to a target sequence, e.g., an APCS mRNA. As used herein, the term “region of complementarity” refers to the region on the antisense strand that is substantially complementary to a sequence, for example a target sequence, e.g., an APCS nucleotide sequence, as defined herein. Where the region of complementarity is not fully complementary to the target sequence, the mismatches can be in the internal or terminal regions of the molecule. Generally, the most tolerated mismatches are in the terminal regions, e.g., within 5, 4, 3, 2, or 1 nucleotides of the 5′- and/or 3′-terminus of the iRNA. In one embodiment, a double stranded RNAi agent of the invention includes a nucleotide mismatch in the antisense strand. In another embodiment, a double stranded RNAi agent of the invention includes a nucleotide mismatch in the sense strand. In one embodiment, the nucleotide mismatch is, for example, within 5, 4, 3, 2, or 1 nucleotides from the 3′-terminus of the iRNA. In another embodiment, the nucleotide mismatch is, for example, in the 3′-terminal nucleotide of the iRNA.

[0098] The term “sense strand” or “passenger strand” as used herein, refers to the strand of an iRNA that includes a region that is substantially complementary to a region of the antisense strand as that term is defined herein.

[0099] As used herein, the term “cleavage region” refers to a region that is located immediately adjacent to the cleavage site. The cleavage site is the site on the target at which cleavage occurs. In some embodiments, the cleavage region comprises three bases on either end of, and immediately adjacent to, the cleavage site. In some embodiments, the cleavage region comprises two bases on either end of, and immediately adjacent to, the cleavage site. In some embodiments, the cleavage site specifically occurs at the site bound by nucleotides 10 and 11 of the antisense strand, and the cleavage region comprises nucleotides 11, 12 and 13.

[0100] As used herein, and unless otherwise indicated, the term “complementary,” when used to describe a first nucleotide sequence in relation to a second nucleotide sequence, refers to the ability of an oligonucleotide or polynucleotide comprising the first nucleotide sequence to hybridize and form a duplex structure under certain conditions with an oligonucleotide or polynucleotide comprising the second nucleotide sequence, as will be understood by the skilled person. Such conditions can, for example, be stringent conditions, where stringent conditions can include: 400 mM NaCl, 40 mM PIPES pH 6.4, 1 mM EDTA, 50° C. or 70° C. for 12-16 hours followed by washing (see, e.g., “Molecular Cloning: A Laboratory Manual, Sambrook, et al. (1989) Cold Spring Harbor Laboratory Press). Other conditions, such as physiologically relevant conditions as can be encountered inside an organism, can apply. The skilled person will be able to determine the set of conditions most appropriate for a test of complementarity of two sequences in accordance with the ultimate application of the hybridized nucleotides.

[0101] Complementary sequences within an iRNA, e.g., within a dsRNA as described herein, include base-pairing of the oligonucleotide or polynucleotide comprising a first nucleotide sequence to an oligonucleotide or polynucleotide comprising a second nucleotide sequence over the entire length of one or both nucleotide sequences. Such sequences can be referred to as “fully complementary” with respect to each other herein. However, where a first sequence is referred to as “substantially complementary” with respect to a second sequence herein, the two sequences can be fully complementary, or they can form one or more, but generally not more than 5, 4, 3 or 2 mismatched base pairs upon hybridization for a duplex up to 30 base pairs, while retaining the ability to hybridize under the conditions most relevant to their ultimate application, e.g., inhibition of gene expression via a RISC pathway. However, where two oligonucleotides are designed to form, upon hybridization, one or more single stranded overhangs, such overhangs shall not be regarded as mismatches with regard to the determination of complementarity. For example, a dsRNA comprising one oligonucleotide 21 nucleotides in length and another oligonucleotide 23 nucleotides in length, wherein the longer oligonucleotide comprises a sequence of 21 nucleotides that is fully complementary to the shorter oligonucleotide, can yet be referred to as “fully complementary” for the purposes described herein.

[0102] “Complementary” sequences, as used herein, can also include, or be formed entirely from, non-Watson-Crick base pairs and/or base pairs formed from non-natural and modified nucleotides, in so far as the above requirements with respect to their ability to hybridize are fulfilled. Such non-Watson-Crick base pairs include, but are not limited to, G:U Wobble or Hoogstein base pairing.

[0103] The terms “complementary,” “fully complementary” and “substantially complementary” herein can be used with respect to the base matching between the sense strand and the antisense strand of a dsRNA, or between the antisense strand of an iRNA agent and a target sequence, as will be understood from the context of their use.

[0104] As used herein, a polynucleotide that is “substantially complementary to at least part of” a messenger RNA (mRNA) refers to a polynucleotide that is substantially complementary to a contiguous portion of the mRNA of interest (i.e., an APCS gene). For example, a polynucleotide is complementary to at least a part of an APCS mRNA if the sequence is substantially complementary to a non-interrupted portion of an mRNA encoding APCS.

[0105] Accordingly, in some embodiments, the sense strand polynucleotides and the antisense polynucleotides disclosed herein are fully complementary to the target APCS gene sequence.

[0106] In one embodiment, the antisense polynucleotides disclosed herein are fully complementary to the target APCS sequence. In other embodiments, the antisense polynucleotides disclosed herein are substantially complementary to the target APCS sequence and comprise a contiguous nucleotide sequence which is at least about 80% complementary over its entire length to the equivalent region of the nucleotide sequence of any one of SEQ ID NO:1, or a fragment of any one of SEQ ID NO:1, such as about 85%, about 86%, about 87%, about 88%, about 89%, about 90%, about % 91%, about 92%, about 93%, about 94%, about 95%, about 96%, about 97%, about 98%, or about 99% complementary.

[0107] In other embodiments, the antisense polynucleotides disclosed herein are substantially complementary to the target APCS sequence and comprise a contiguous nucleotide sequence which is at least about 80% complementary over its entire length to any one of the sense strand nucleotide sequences in any one of Tables 3A, 3B, 4A, 4B, 6, and 7, or a fragment of any one of the sense strand nucleotide sequences in any one of Tables 3A, 3B, 4A, 4B, 6, and 7, such as about 85%, about 86%, about 87%, about 88%, about 89%, about 90%, about % 91%, about 92%, about 93%, about 94%, about 95%, about 96%, about 97%, about 98%, or about 99% complementary.

[0108] In one embodiment, an RNAi agent of the invention includes a sense strand that is substantially complementary to an antisense polynucleotide which, in turn, is complementary to a target APCS sequence and comprises a contiguous nucleotide sequence which is at least about 80% complementary over its entire length to any one of the sense strand nucleotide sequences in any one of Tables 3A, 3B, 4A, 4B, 6, and 7, or a fragment of any one of the sense strand nucleotide sequences in any one of Tables 3A, 3B, 4A, 4B, 6, and 7, such as about 85%, about 86%, about 87%, about 88%, about 89%, about 90%, about % 91%, about 92%, about 93%, about 94%, about 95%, about 96%, about 97%, about 98%, or about 99% complementary.

[0109] In one aspect of the invention, an agent for use in the methods and compositions of the invention is a single-stranded antisense RNA molecule that inhibits a target mRNA via an antisense inhibition mechanism. The single-stranded antisense RNA molecule is complementary to a sequence within the target mRNA. The single-stranded antisense oligonucleotides can inhibit translation in a stoichiometric manner by base pairing to the mRNA and physically obstructing the translation machinery, see Dias, N. et al., (2002) Mol Cancer Ther 1:347-355. The single-stranded antisense RNA molecule may be about 15 to about 30 nucleotides in length and have a sequence that is complementary to a target sequence. For example, the single-stranded antisense RNA molecule may comprise a sequence that is at least about 15, 16, 17, 18, 19, 20, or more contiguous nucleotides from any one of the antisense sequences described herein.

[0110] As used herein, the term “APCS-associated disease” is a disease or disorder that is caused by, or associated with the expression of the APCS gene. The term “APCS-associated disease” includes a disease, disorder or condition that would benefit from reduction in APCS expression. An APCS-associated disease includes amyloid-associated diseases, e.g., diseases that are characterized by formation of amyloid deposits. Exemplary amyloid-associated diseases include, but are not limited to, amyloidosis, Alzheimer's disease; diabetes mellitus type 2; Parkinson's disease; transmissible spongiform encephalopathy (such as bovine spongiform encephalopathy); fatal familial insomnia; Huntington's disease; medullary carcinoma of the thyroid; cardiac arrhythmias; isolated atrial amyloidosis; rheumatoid arthritis; aortic medial amyloid; prolactinoma; familial amyloid polyneuropathy; lattice corneal dystrophy; cerebral amyloid angiopathy; cerebral amyloid angiopathy (Icelandic type); sporadic inclusion body myositis.

[0111] In one embodiment, the amyloid-associated disease is amyloidosis, e.g., primary (systemic AL) amyloidosis, secondary (systemic AA) amyloidosis, dialysis-related amyloidosis (DRA), familial (hereditary FA) amyloidosis, senile systemic amyloidosis (SSA) and organ-specific amyloidosis.

[0112] An APCS-associated disease may also be a cardiovascular disease, e.g., a coronary atherosclerotic heard disease.

[0113] “Therapeutically effective amount,” as used herein, is intended to include the amount of an RNAi agent that, when administered to a subject having a APCS-associated disease, is sufficient to effect treatment of the disease (e.g., by diminishing, ameliorating or maintaining the existing disease or one or more symptoms of disease). The “therapeutically effective amount” may vary depending on the RNAi agent or antibody, or antigen-binding fragment thereof, how the agent is administered, the disease and its severity and the history, age, weight, family history, genetic makeup, the types of preceding or concomitant treatments, if any, and other individual characteristics of the subject to be treated.

[0114] “Prophylactically effective amount,” as used herein, is intended to include the amount of an iRNA agent that, when administered to a subject having a APCS-associated disease but not yet (or currently) experiencing or displaying symptoms of the disease, and/or a subject at risk of developing a APCS-associated disease, e.g., a subject having multiple myeloma, a subject on kidney dialysis or a subject with family history of amyloidosis, is sufficient to prevent or ameliorate the disease or one or more symptoms of the disease. Ameliorating the disease includes slowing the course of the disease or reducing the severity of later-developing disease. The “prophylactically effective amount” may vary depending on the iRNA agent, how the agent is administered, the degree of risk of disease, and the history, age, weight, family history, genetic makeup, the types of preceding or concomitant treatments, if any, and other individual characteristics of the patient to be treated.

[0115] A “therapeutically effective amount” or “prophylactically effective amount” also includes an amount of an RNAi agent that produces some desired local or systemic effect at a reasonable benefit/risk ratio applicable to any treatment. iRNA agents employed in the methods of the present invention may be administered in a sufficient amount to produce a reasonable benefit/risk ratio applicable to such treatment.

[0116] As used herein, a “subject” is an animal, such as a mammal, including a primate (such as a human, a non-human primate, e.g., a monkey, and a chimpanzee), a non-primate (such as a cow, a pig, a camel, a llama, a horse, a goat, a rabbit, a sheep, a hamster, a guinea pig, a cat, a dog, a rat, a mouse, a horse, and a whale), or a bird (e.g., a duck or a goose). In an embodiment, the subject is a human, such as a human being treated or assessed for a disease, disorder or condition that would benefit from reduction in APCS expression; a human at risk for a disease, disorder or condition that would benefit from reduction in APCS expression; a human having a disease, disorder or condition that would benefit from reduction in APCS expression; and/or human being treated for a disease, disorder or condition that would benefit from reduction in APCS expression as described herein.

### II. iRNAs of the Invention

[0117] The present invention provides iRNAs which inhibit the expression of an APCS gene. In one embodiment, the iRNA agent includes double stranded ribonucleic acid (dsRNA) molecules for inhibiting the expression of an APCS gene in a cell, such as a cell within a subject, e.g., a mammal, such as a human having a APCS-associated disease as described herein, e.g., amyloidosis, Alzheimer's disease or coronary atherosclerotic heart disease. The dsRNA includes an antisense strand having a region of complementarity which is complementary to at least a part of an mRNA formed in the expression of a target gene, i.e., APCS gene. The region of complementarity is about 30 nucleotides or less in length (e.g., about 30, 29, 28, 27, 26, 25, 24, 23, 22, 21, 20, 19, or 18 nucleotides or less in length). Upon contact with a cell expressing the target gene, the iRNA selectively inhibits the expression of the target gene (e.g., a human, a primate, a non-primate, or a bird APCS gene) by at least about 10%, by at least 30%, preferably at least 50% as assayed by, for example, a PCR or branched DNA (bDNA)-based method, or by a protein-based method, such as by immunofluorescence analysis, using, for example, western blotting or flow cytometric techniques. In preferred embodiments, inhibition of expression is determined by the luciferase assay provided in the examples. For in vitro assessment of activity, percent inhibition is determined using the methods provided in Example 2 at a single dose at a 10 nM duplex final concentration. For in vivo studies, the level after treatment can be compared to, for example, an appropriate historical control or a pooled population sample control to determine the level of reduction, e.g., when a baseline value is no available for the subject.

[0118] An RNAi agent is a dsRNA that includes two RNA strands that are complementary and hybridize to form a duplex structure under conditions in which the dsRNA will be used. One strand of a dsRNA (the antisense strand) includes a region of complementarity that is substantially complementary, and generally fully complementary, to a target sequence. The target sequence can be derived from the sequence of an mRNA formed during the expression of an APCS gene. The other strand (the sense strand) includes a region that is complementary to the antisense strand, such that the two strands hybridize and form a duplex structure when combined under suitable conditions. As described elsewhere herein and as known in the art, the complementary sequences of a dsRNA can also be contained as self-complementary regions of a single nucleic acid molecule, as opposed to being on separate oligonucleotides.

[0119] Generally, the duplex structure is between 15 and 30 base pairs in length, e.g., between, 15-29, 15-28, 15-27, 15-26, 15-25, 15-24, 15-23, 15-22, 15-21, 15-20, 15-19, 15-18, 15-17, 18-30, 18-29, 18-28, 18-27, 18-26, 18-25, 18-24, 18-23, 18-22, 18-21, 18-20, 19-30, 19-29, 19-28, 19-27, 19-26, 19-25, 19-24, 19-23, 19-22, 19-21, 19-20, 20-30, 20-29, 20-28, 20-27, 20-26, 20-25, 20-24, 20-23, 20-22, 20-21, 21-30, 21-29, 21-28, 21-27, 21-26, 21-25, 21-24, 21-23, or 21-22 base pairs in length. Ranges and lengths intermediate to the above recited ranges and lengths are also contemplated to be part of the invention.

[0120] Similarly, the region of complementarity to the target sequence is between 15 and 30 nucleotides in length, e.g., between 15-29, 15-28, 15-27, 15-26, 15-25, 15-24, 15-23, 15-22, 15-21, 15-20, 15-19, 15-18, 15-17, 18-30, 18-29, 18-28, 18-27, 18-26, 18-25, 18-24, 18-23, 18-22, 18-21, 18-20, 19-30, 19-29, 19-28, 19-27, 19-26, 19-25, 19-24, 19-23, 19-22, 19-21, 19-20, 20-30, 20-29, 20-28, 20-27, 20-26, 20-25, 20-24, 20-23, 20-22, 20-21, 21-30, 21-29, 21-28, 21-27, 21-26, 21-25, 21-24, 21-23, or 21-22 nucleotides in length. Ranges and lengths intermediate to the above recited ranges and lengths are also contemplated to be part of the invention.

[0121] In some embodiments, the sense and antisense strands of the dsRNA are each independently about 15 to about 30 nucleotides in length, or about 25 to about 30 nucleotides in length, e.g., each strand is independently between 15-29, 15-28, 15-27, 15-26, 15-25, 15-24, 15-23, 15-22, 15-21, 15-20, 15-19, 15-18, 15-17, 18-30, 18-29, 18-28, 18-27, 18-26, 18-25, 18-24, 18-23, 18-22, 18-21, 18-20, 19-30, 19-29, 19-28, 19-27, 19-26, 19-25, 19-24, 19-23, 19-22, 19-21, 19-20, 20-30, 20-29, 20-28, 20-27, 20-26, 20-25, 20-24, 20-23, 20-22, 20-21, 21-30, 21-29, 21-28, 21-27, 21-26, 21-25, 21-24, 21-23, or 21-22 nucleotides in length. In one embodiment, an RNAi agent of the invention is a dsRNA of 24-30 nucleotides that interacts with a target RNA sequence, i.e., an APCS target mRNA sequence, to direct the cleavage of the target RNA. In general, the dsRNA is long enough to serve as a substrate for the Dicer enzyme. For example, it is well-known in the art that dsRNAs longer than about 21-23 nucleotides in length may serve as substrates for Dicer. As the ordinarily skilled person will also recognize, the region of an RNA targeted for cleavage will most often be part of a larger RNA molecule, often an mRNA molecule. Where relevant, a “part” of an mRNA target is a contiguous sequence of an mRNA target of sufficient length to allow it to be a substrate for RNAi-directed cleavage (i.e., cleavage through a RISC pathway).

[0122] One of skill in the art will also recognize that the duplex region is a primary functional portion of a dsRNA, e.g., a duplex region of about 9 to 36 base pairs, e.g., about 10-36, 11-36, 12-36, 13-36, 14-36, 15-36, 9-35, 10-35, 11-35, 12-35, 13-35, 14-35, 15-35, 9-34, 10-34, 11-34, 12-34, 13-34, 14-34, 15-34, 9-33, 10-33, 11-33, 12-33, 13-33, 14-33, 15-33, 9-32, 10-32, 11-32, 12-32, 13-32, 14-32, 15-32, 9-31, 10-31, 11-31, 12-31, 13-32, 14-31, 15-31, 15-30, 15-29, 15-28, 15-27, 15-26, 15-25, 15-24, 15-23, 15-22, 15-21, 15-20, 15-19, 15-18, 15-17, 18-30, 18-29, 18-28, 18-27, 18-26, 18-25, 18-24, 18-23, 18-22, 18-21, 18-20, 19-30, 19-29, 19-28, 19-27, 19-26, 19-25, 19-24, 19-23, 19-22, 19-21, 19-20, 20-30, 20-29, 20-28, 20-27, 20-26, 20-25, 20-24, 20-23, 20-22, 20-21, 21-30, 21-29, 21-28, 21-27, 21-26, 21-25, 21-24, 21-23, or 21-22 base pairs. Thus, in one embodiment, to the extent that it becomes processed to a functional duplex, of e.g., 15-30 base pairs, that targets a desired RNA for cleavage, an RNA molecule or complex of RNA molecules having a duplex region greater than 30 base pairs is a dsRNA. Thus, an ordinarily skilled artisan will recognize that in one embodiment, a miRNA is a dsRNA. In another embodiment, a dsRNA is not a naturally occurring miRNA. In another embodiment, an iRNA agent useful to target APCS expression is not generated in the target cell by cleavage of a larger dsRNA.

[0123] A RNAi agent as described herein can further include one or more single-stranded nucleotide overhangs e.g., 1, 2, 3, or 4 nucleotides. RNAi agent having at least one nucleotide overhang can have unexpectedly superior inhibitory properties relative to their blunt-ended counterparts. A nucleotide overhang can comprise or consist of a nucleotide/nucleoside analog, including a deoxynucleotide/nucleoside. The overhang(s) can be on the sense strand, the antisense strand or any combination thereof. Furthermore, the nucleotide(s) of an overhang can be present on the 5′-end, 3′-end or both ends of either an antisense or sense strand of the RNAi agent. In certain embodiments, longer, extended overhangs are possible.

[0124] A dsRNA can be synthesized by standard methods known in the art as further discussed below, e.g., by use of an automated DNA synthesizer, such as are commercially available from, for example, Biosearch, Applied Biosystems, Inc.

[0125] RNAi agents of the invention may be prepared using a two-step procedure. First, the individual strands of the double stranded RNA molecule are prepared separately. Then, the component strands are annealed. The individual strands of the iRNA agent can be prepared using solution-phase or solid-phase organic synthesis or both. Organic synthesis offers the advantage that the oligonucleotide strands comprising unnatural or modified nucleotides can be easily prepared. Single-stranded oligonucleotides of the invention can be prepared using solution-phase or solid-phase organic synthesis or both.

[0126] In one aspect, an RNAi agent of the invention includes at least two nucleotide sequences, a sense sequence and an anti-sense sequence.

[0127] In one embodiment, the sense strand is selected from the group of sequences provided in any one of Tables 3A, 3B, 4A, 4B, 6, and 7, and the corresponding antisense strand of the sense strand is selected from the group of sequences of any one of Tables 3A, 3B, 4A, 4B, 6, and 7. In this aspect, one of the two sequences is complementary to the other of the two sequences, with one of the sequences being substantially complementary to a sequence of an mRNA generated in the expression of an APCS gene. As such, in this aspect, a dsRNA will include two oligonucleotides, where one oligonucleotide is described as the sense strand in any one of Tables 3A, 3B, 4A, 4B, 6, and 7 and the second oligonucleotide is described as the corresponding antisense strand of the sense strand in any one of Tables 3A, 3B, 4A, 4B, 6, and 7. In one embodiment, the substantially complementary sequences of the RNAi agent are contained on separate oligonucleotides. In another embodiment, the substantially complementary sequences of the RNAi agent are contained on a single oligonucleotide.

[0128] It will be understood that, although some of the sequences in Tables 3A, 3B, 4A, 4B, 6, and 7 are described as modified and/or conjugated sequences, the RNA of the iRNA of the invention e.g., a dsRNA of the invention, may comprise any one of the sequences set forth in Tables 3A, 3B, 4A, 4B, 6, and 7 that is un-modified, un-conjugated, and/or modified and/or conjugated differently than described therein.

[0129] The skilled person is well aware that dsRNAs having a duplex structure of between about 20 and 23 base pairs, e.g., 21, base pairs have been hailed as particularly effective in inducing RNA interference (Elbashir et al., EMBO 2001, 20:6877-6888). However, others have found that shorter or longer RNA duplex structures can also be effective (Chu and Rana (2007) RNA 14:1714-1719; Kim et al. (2005) Nat Biotech 23:222-226). In the embodiments described above, by virtue of the nature of the oligonucleotide sequences provided in any one of Tables 3A, 3B, 4A, 4B, 6, and 7, the RNAi agents described herein can include at least one strand of a length of minimally 21 nucleotides. It can be reasonably expected that shorter duplexes having one of the sequences of any one of Tables 3A, 3B, 4A, 4B, 6, and 7 minus only a few nucleotides on one or both ends can be similarly effective as compared to the dsRNAs described above. Hence, dsRNAs having a sequence of at least 15, 16, 17, 18, 19, 20, or more contiguous nucleotides derived from one of the sequences of any one of Tables 3A, 3B, 4A, 4B, 6, and 7, and differing in their ability to inhibit the expression of the target gene by not more than about 5, 10, 15, 20, 25, or 30% inhibition from a dsRNA comprising the full sequence, are contemplated to be within the scope of the present invention.

[0130] In addition, the RNAs provided in any one of Tables 3A, 3B, 4A, 4B, 6, and 7 identify a site(s) in an APCS transcript that is susceptible to RISC-mediated cleavage. As such, the present invention further features iRNAs that target within one of these sites. As used herein, an iRNA is said to target within a particular site of an RNA transcript if the iRNA promotes cleavage of the transcript anywhere within that particular site. Such an iRNA will generally include at least about 15 contiguous nucleotides from one of the sequences provided in any one of Tables 3A, 3B, 4A, 4B, 6, and 7 coupled to additional nucleotide sequences taken from the region contiguous to the selected sequence in the target gene.

[0131] While a target sequence is generally about 15-30 nucleotides in length, there is wide variation in the suitability of particular sequences in this range for directing cleavage of any given target RNA. Various software packages and the guidelines set out herein provide guidance for the identification of optimal target sequences for any given gene target, but an empirical approach can also be taken in which a “window” or “mask” of a given size (as a non-limiting example, 21 nucleotides) is literally or figuratively (including, e.g., in silico) placed on the target RNA sequence to identify sequences in the size range that can serve as target sequences. By moving the sequence “window” progressively one nucleotide upstream or downstream of an initial target sequence location, the next potential target sequence can be identified, until the complete set of possible sequences is identified for any given target size selected. This process, coupled with systematic synthesis and testing of the identified sequences (using assays as described herein or as known in the art) to identify those sequences that perform optimally can identify those RNA sequences that, when targeted with an RNAi agent, mediate the best inhibition of target gene expression. Thus, while the sequences identified, for example, in any one of Tables 3A, 3B, 4A, 4B, 6, and 7 represent effective target sequences, it is contemplated that further optimization of inhibition efficiency can be achieved by progressively “walking the window” one nucleotide upstream or downstream of the given sequences to identify sequences with equal or better inhibition characteristics.

[0132] Further, it is contemplated that for any sequence identified, e.g., in any one of Tables 3A, 3B, 4A, 4B, 6, and 7, further optimization could be achieved by systematically either adding or removing nucleotides to generate longer or shorter sequences and testing those sequences generated by walking a window of the longer or shorter size up or down the target RNA from that point. Again, coupling this approach to generating new candidate targets with testing for effectiveness of iRNAs based on those target sequences in an inhibition assay as known in the art and/or as described herein can lead to further improvements in the efficiency of inhibition. Further still, such optimized sequences can be adjusted by, e.g., the introduction of modified nucleotides as described herein or as known in the art, addition or changes in overhang, or other modifications as known in the art and/or discussed herein to further optimize the molecule (e.g., increasing serum stability or circulating half-life, increasing thermal stability, enhancing transmembrane delivery, targeting to a particular location or cell type, increasing interaction with silencing pathway enzymes, increasing release from endosomes) as an expression inhibitor.

[0133] An iRNA as described herein can contain one or more mismatches to the target sequence. In one embodiment, an iRNA as described herein contains no more than 3 mismatches. If the antisense strand of the iRNA contains mismatches to a target sequence, it is preferable that the area of mismatch is not located in the center of the region of complementarity. If the antisense strand of the iRNA contains mismatches to the target sequence, it is preferable that the mismatch be restricted to be within the last 5 nucleotides from either the 5′- or 3′-end of the region of complementarity. For example, for a 23 nucleotide iRNA agent the strand which is complementary to a region of, e.g., an APCS gene, generally does not contain any mismatch within the central 13 nucleotides. The methods described herein or methods known in the art can be used to determine whether an iRNA containing a mismatch to a target sequence is effective in inhibiting the expression of a target gene, e.g., an APCS gene. Consideration of the efficacy of iRNAs with mismatches in inhibiting expression of a target gene is important, especially if the particular region of complementarity in a target gene is known to have polymorphic sequence variation within the population.

### III. Modified iRNAs of the Invention

[0134] In one embodiment, the RNA of the iRNA of the invention e.g., a dsRNA, is un-modified, and does not comprise, e.g., chemical modifications and/or conjugations known in the art and described herein. In another embodiment, the RNA of an iRNA of the invention, e.g., a dsRNA, is chemically modified to enhance stability or other beneficial characteristics. In certain embodiments of the invention, substantially all of the nucleotides of an iRNA of the invention are modified. In other embodiments of the invention, all of the nucleotides of an iRNA of the invention are modified iRNAs of the invention in which “substantially all of the nucleotides are modified” are largely but not wholly modified and can include not more than 5, 4, 3, 2, or 1 unmodified nucleotides.

[0135] The nucleic acids featured in the invention can be synthesized and/or modified by methods well established in the art, such as those described in “Current protocols in nucleic acid chemistry,” Beaucage, S. L. et al. (Edrs.), John Wiley & Sons, Inc., New York, NY, USA, which is hereby incorporated herein by reference. Modifications include, for example, end modifications, e.g., 5′-end modifications (phosphorylation, conjugation, inverted linkages) or 3′-end modifications (conjugation, DNA nucleotides, inverted linkages, etc.); base modifications, e.g., replacement with stabilizing bases, destabilizing bases, or bases that base pair with an expanded repertoire of partners, removal of bases (abasic nucleotides), or conjugated bases; sugar modifications (e.g., at the 2′-position or 4′-position) or replacement of the sugar; and/or backbone modifications, including modification or replacement of the phosphodiester linkages. Specific examples of iRNA compounds useful in the embodiments described herein include, but are not limited to RNAs containing modified backbones or no natural internucleoside linkages. RNAs having modified backbones include, among others, those that do not have a phosphorus atom in the backbone. For the purposes of this specification, and as sometimes referenced in the art, modified RNAs that do not have a phosphorus atom in their internucleoside backbone can also be considered to be oligonucleosides. In some embodiments, a modified iRNA will have a phosphorus atom in its internucleoside backbone.

[0136] Modified RNA backbones include, for example, phosphorothioates, chiral phosphorothioates, phosphorodithioates, phosphotriesters, aminoalkylphosphotriesters, methyl and other alkyl phosphonates including 3′-alkylene phosphonates and chiral phosphonates, phosphinates, phosphoramidates including 3′-amino phosphoramidate and aminoalkylphosphoramidates, thionophosphoramidates, thionoalkylphosphonates, thionoalkylphosphotriesters, and boranophosphates having normal 3′-5′ linkages, 2′-5′-linked analogs of these, and those having inverted polarity wherein the adjacent pairs of nucleoside units are linked 3′-5′ to 5′-3′ or 2′-5′ to 5′-2′. Various salts, mixed salts and free acid forms are also included. In some embodiments of the invention, the dsRNA agents of the invention are in a free acid form. In other embodiments of the invention, the dsRNA agents of the invention are in a salt form. In one embodiment, the dsRNA agents of the invention are in a sodium salt form. In certain embodiments, when the dsRNA agents of the invention are in the sodium salt form, sodium ions are present in the agent as counterions for substantially all of the phosphodiester and/or phosphorothiotate groups present in the agent. Agents in which substantially all of the phosphodiester and/or phosphorothioate linkages have a sodium counterion include not more than 5, 4, 3, 2, or 1 phosphodiester and/or phosphorothioate linkages without a sodium counterion. In some embodiments, when the dsRNA agents of the invention are in the sodium salt form, sodium ions are present in the agent as counterions for all of the phosphodiester and/or phosphorothiotate groups present in the agent.

[0137] Representative U.S. patents that teach the preparation of the above phosphorus-containing linkages include, but are not limited to, U.S. Pat. Nos. 3,687,808; 4,469,863; 4,476,301; 5,023,243; 5,177,195; 5,188,897; 5,264,423; 5,276,019; 5,278,302; 5,286,717; 5,321,131; 5,399,676; 5,405,939; 5,453,496; 5,455,233; 5,466,677; 5,476,925; 5,519,126; 5,536,821; 5,541,316; 5,550,111; 5,563,253; 5,571,799; 5,587,361; 5,625,050; 6,028,188; 6,124,445; 6,160,109; 6,169,170; 6,172,209; 6,239,265; 6,277,603; 6,326,199; 6,346,614; 6,444,423; 6,531,590; 6,534,639; 6,608,035; 6,683,167; 6,858,715; 6,867,294; 6,878,805; 7,015,315; 7,041,816; 7,273,933; 7,321,029; and U.S. Pat. No. RE39,464, the entire contents of each of which are hereby incorporated herein by reference.

[0138] Modified RNA backbones that do not include a phosphorus atom therein have backbones that are formed by short chain alkyl or cycloalkyl internucleoside linkages, mixed heteroatoms and alkyl or cycloalkyl internucleoside linkages, or one or more short chain heteroatomic or heterocyclic internucleoside linkages. These include those having morpholino linkages (formed in part from the sugar portion of a nucleoside); siloxane backbones; sulfide, sulfoxide and sulfone backbones; formacetyl and thioformacetyl backbones; methylene formacetyl and thioformacetyl backbones; alkene containing backbones; sulfamate backbones; methyleneimino and methylenehydrazino backbones; sulfonate and sulfonamide backbones; amide backbones; and others having mixed N, O, S and CH₂ component parts.

[0139] Representative U.S. patents that teach the preparation of the above oligonucleosides include, but are not limited to, U.S. Pat. Nos. 5,034,506; 5,166,315; 5,185,444; 5,214,134; 5,216,141; 5,235,033; 5,64,562; 5,264,564; 5,405,938; 5,434,257; 5,466,677; 5,470,967; 5,489,677; 5,541,307; 5,561,225; 5,596,086; 5,602,240; 5,608,046; 5,610,289; 5,618,704; 5,623,070; 5,663,312; 5,633,360; 5,677,437; and, 5,677,439, the entire contents of each of which are hereby incorporated herein by reference.

[0140] In other embodiments, suitable RNA mimetics are contemplated for use in iRNAs, in which both the sugar and the internucleoside linkage, i.e., the backbone, of the nucleotide units are replaced with novel groups. The base units are maintained for hybridization with an appropriate nucleic acid target compound. One such oligomeric compound, an RNA mimetic that has been shown to have excellent hybridization properties, is referred to as a peptide nucleic acid (PNA). In PNA compounds, the sugar backbone of an RNA is replaced with an amide containing backbone, in particular an aminoethylglycine backbone. The nucleobases are retained and are bound directly or indirectly to aza nitrogen atoms of the amide portion of the backbone. Representative U.S. patents that teach the preparation of PNA compounds include, but are not limited to, U.S. Pat. Nos. 5,539,082; 5,714,331; and 5,719,262, the entire contents of each of which are hereby incorporated herein by reference. Additional PNA compounds suitable for use in the iRNAs of the invention are described in, for example, in Nielsen et al., Science, 1991, 254, 1497-1500.

[0141] Some embodiments featured in the invention include RNAs with phosphorothioate backbones and oligonucleosides with heteroatom backbones, and in particular —CH₂—NH—CH₂—, —CH₂—N(CH₃)—O—CH₂— [known as a methylene (methylimino) or MMI backbone], —CH₂—O—N(CH₃)—CH₂—, —CH₂—N(CH₃)—N(CH₃)—CH₂— and —N(CH₃)—CH₂—CH₂— [wherein the native phosphodiester backbone is represented as —O—P—O—CH₂—] of the above-referenced U.S. Pat. No. 5,489,677, and the amide backbones of the above-referenced U.S. Pat. No. 5,602,240. In some embodiments, the RNAs featured herein have morpholino backbone structures of the above-referenced U.S. Pat. No. 5,034,506.

[0142] Modified RNAs can also contain one or more substituted sugar moieties. The iRNAs, e.g., dsRNAs, featured herein can include one of the following at the 2′-position: OH; F; O—, S—, or N-alkyl; O—, S—, or N-alkenyl; O-, S- or N-alkynyl; or O-alkyl-O-alkyl, wherein the alkyl, alkenyl and alkynyl can be substituted or unsubstituted C₁ to C₁₀ alkyl or C₂ to C₁₀ alkenyl and alkynyl. Exemplary suitable modifications include O[(CH₂)ₙO]ₘCH₃, O(CH₂)ₙOCH₃, O(CH₂)ₙNH₂, O(CH₂)ₙCH₃, O(CH₂)ₙONH₂, and O(CH₂)ₙON[(CH₂)ₙCH₃)]₂, where n and m are from 1 to about 10. In other embodiments, dsRNAs include one of the following at the 2′ position: C₁ to C₁₀ lower alkyl, substituted lower alkyl, alkaryl, aralkyl, O-alkaryl or O-aralkyl, SH, SCH₃, OCN, Cl, Br, CN, CF₃, OCF₃, SOCH₃, SO₂CH₃, ONO₂, NO₂, N₃, NH₂, heterocycloalkyl, heterocycloalkaryl, aminoalkylamino, polyalkylamino, substituted silyl, an RNA cleaving group, a reporter group, an intercalator, a group for improving the pharmacokinetic properties of an iRNA, or a group for improving the pharmacodynamic properties of an iRNA, and other substituents having similar properties. In some embodiments, the modification includes a 2′-methoxyethoxy (2′-O—CH₂CH₂OCH₃, also known as 2′-O-(2-methoxyethyl) or 2′-MOE) (Martin et al., Helv. Chim. Acta, 1995, 78:486-504) i.e., an alkoxy-alkoxy group. Another exemplary modification is 2′-dimethylaminooxyethoxy, i.e., a O(CH₂)₂ON(CH₃)₂ group, also known as 2′-DMAOE, as described in examples herein below, and 2′-dimethylaminoethoxyethoxy (also known in the art as 2′-O-dimethylaminoethoxyethyl or 2′-DMAEOE), i.e., 2′-O—CH₂—O—CH₂—N(CH₂)₂.

[0143] Other modifications include 2′-methoxy (2′-OCH₃), 2′-aminopropoxy (2′-OCH₂CH₂CH₂NH₂) and 2′-fluoro (2′-F). Similar modifications can also be made at other positions on the RNA of an iRNA, particularly the 3′ position of the sugar on the 3′ terminal nucleotide or in 2′-5′ linked dsRNAs and the 5′ position of 5′ terminal nucleotide. iRNAs can also have sugar mimetics such as cyclobutyl moieties in place of the pentofuranosyl sugar. Representative U.S. patents that teach the preparation of such modified sugar structures include, but are not limited to, U.S. Pat. Nos. 4,981,957; 5,118,800; 5,319,080; 5,359,044; 5,393,878; 5,446,137; 5,466,786; 5,514,785; 5,519,134; 5,567,811; 5,576,427; 5,591,722; 5,597,909; 5,610,300; 5,627,053; 5,639,873; 5,646,265; 5,658,873; 5,670,633; and 5,700,920, certain of which are commonly owned with the instant application. The entire contents of each of the foregoing are hereby incorporated herein by reference.

[0144] The RNA of an iRNA of the invention can also include nucleobase (often referred to in the art simply as “base”) modifications or substitutions. As used herein, “unmodified” or “natural” nucleobases include the purine bases adenine (A) and guanine (G), and the pyrimidine bases thymine (T), cytosine (C) and uracil (U). Modified nucleobases include other synthetic and natural nucleobases such as deoxy-thymine (dT), 5-methylcytosine (5-me-C), 5-hydroxymethyl cytosine, xanthine, hypoxanthine, 2-aminoadenine, 6-methyl and other alkyl derivatives of adenine and guanine, 2-propyl and other alkyl derivatives of adenine and guanine, 2-thiouracil, 2-thiothymine and 2-thiocytosine, 5-halouracil and cytosine, 5-propynyl uracil and cytosine, 6-azo uracil, cytosine and thymine, 5-uracil (pseudouracil), 4-thiouracil, 8-halo, 8-amino, 8-thiol, 8-thioalkyl, 8-hydroxyl anal other 8-substituted adenines and guanines, 5-halo, particularly 5-bromo, 5-trifluoromethyl and other 5-substituted uracils and cytosines, 7-methylguanine and 7-methyladenine, 8-azaguanine and 8-azaadenine, 7-deazaguanine and 7-daazaadenine and 3-deazaguanine and 3-deazaadenine. Further nucleobases include those disclosed in U.S. Pat. No. 3,687,808, those disclosed in Modified Nucleosides in Biochemistry, Biotechnology and Medicine, Herdewijn, P. ed. Wiley-VCH, 2008; those disclosed in The Concise Encyclopedia Of Polymer Science And Engineering, pages 858-859, Kroschwitz, J. L, ed. John Wiley & Sons, 1990, these disclosed by Englisch et al., Angewandte Chemie, International Edition, 1991, 30, 613, and those disclosed by Sanghvi, Y S., Chapter 15, dsRNA Research and Applications, pages 289-302, Crooke, S. T. and Lebleu, B., Ed., CRC Press, 1993. Certain of these nucleobases are particularly useful for increasing the binding affinity of the oligomeric compounds featured in the invention. These include 5-substituted pyrimidines, 6-azapyrimidines and N-2, N-6 and 0-6 substituted purines, including 2-aminopropyladenine, 5-propynyluracil and 5-propynylcytosine. 5-methylcytosine substitutions have been shown to increase nucleic acid duplex stability by 0.6-1.2° C. (Sanghvi, Y. S., Crooke, S. T. and Lebleu, B., Eds., dsRNA Research and Applications, CRC Press, Boca Raton, 1993, pp. 276-278) and are exemplary base substitutions, even more particularly when combined with 2′-O-methoxyethyl sugar modifications.

[0145] Representative U.S. patents that teach the preparation of certain of the above noted modified nucleobases as well as other modified nucleobases include, but are not limited to, the above noted U.S. Pat. Nos. 3,687,808, 4,845,205; 5,130,30; 5,134,066; 5,175,273; 5,367,066; 5,432,272; 5,457,187; 5,459,255; 5,484,908; 5,502,177; 5,525,711; 5,552,540; 5,587,469; 5,594,121, 5,596,091; 5,614,617; 5,681,941; 5,750,692; 6,015,886; 6,147,200; 6,166,197; 6,222,025; 6,235,887; 6,380,368; 6,528,640; 6,639,062; 6,617,438; 7,045,610; 7,427,672; and 7,495,088, the entire contents of each of which are hereby incorporated herein by reference.

[0146] The RNA of an iRNA can also be modified to include one or more locked nucleic acids (LNA). A locked nucleic acid is a nucleotide having a modified ribose moiety in which the ribose moiety comprises an extra bridge connecting the 2′ and 4′ carbons. This structure effectively “locks” the ribose in the 3′-endo structural conformation. The addition of locked nucleic acids to siRNAs has been shown to increase siRNA stability in serum, and to reduce off-target effects (Elmen, J. et al., (2005) Nucleic Acids Research 33(1):439-447; Mook, O R. et al., (2007) Mol Canc Ther 6(3):833-843; Grunweller, A. et al., (2003) Nucleic Acids Research 31(12):3185-3193).

[0147] In some embodiments, the iRNA of the invention comprises one or more monomers that are UNA (unlocked nucleic acid) nucleotides. UNA is unlocked acyclic nucleic acid, wherein any of the bonds of the sugar has been removed, forming an unlocked “sugar” residue. In one example, UNA also encompasses monomer with bonds between C1′-C4′ have been removed (i.e., the covalent carbon-oxygen-carbon bond between the C1′ and C4′ carbons). In another example, the C2′-C3′ bond (i.e. the covalent carbon-carbon bond between the C2′ and C3′ carbons) of the sugar has been removed (see Nuc. Acids Symp. Series, 52, 133-134 (2008) and Fluiter et al., Mol. Biosyst., 2009, 10, 1039 hereby incorporated by reference).

[0148] The RNA of an iRNA can also be modified to include one or more bicyclic sugar moities. A “bicyclic sugar” is a furanosyl ring modified by the bridging of two atoms. A“bicyclic nucleoside” (“BNA”) is a nucleoside having a sugar moiety comprising a bridge connecting two carbon atoms of the sugar ring, thereby forming a bicyclic ring system. In certain embodiments, the bridge connects the 4′-carbon and the 2′-carbon of the sugar ring. Thus, in some embodiments an agent of the invention may include one or more locked nucleic acids (LNA). A locked nucleic acid is a nucleotide having a modified ribose moiety in which the ribose moiety comprises an extra bridge connecting the 2′ and 4′ carbons. In other words, an LNA is a nucleotide comprising a bicyclic sugar moiety comprising a 4′-CH2-O-2′ bridge. This structure effectively “locks” the ribose in the 3′-endo structural conformation. The addition of locked nucleic acids to siRNAs has been shown to increase siRNA stability in serum, and to reduce off-target effects (Elmen, J. et al., (2005) Nucleic Acids Research 33(1):439-447; Mook, O R. et al., (2007) Mol Canc Ther 6(3):833-843; Grunweller, A. et al., (2003) Nucleic Acids Research 31(12):3185-3193). Examples of bicyclic nucleosides for use in the polynucleotides of the invention include without limitation nucleosides comprising a bridge between the 4′ and the 2′ ribosyl ring atoms. In certain embodiments, the antisense polynucleotide agents of the invention include one or more bicyclic nucleosides comprising a 4′ to 2′ bridge. Examples of such 4′ to 2′ bridged bicyclic nucleosides, include but are not limited to 4′-(CH2)O-2′ (LNA); 4′-(CH2)S-2′; 4′-(CH2)2-O-2′ (ENA); 4′-CH(CH3)-O-2′ (also referred to as “constrained ethyl” or “cEt”) and 4′-CH(CH2OCH3)-O-2′ (and analogs thereof; see, e.g., U.S. Pat. No. 7,399,845); 4′-C(CH3)(CH3)-O-2′ (and analogs thereof; see e.g., U.S. Pat. No. 8,278,283); 4′-CH2-N(OCH3)-2′ (and analogs thereof; see e.g., U.S. Pat. No. 8,278,425); 4′-CH2-O—N(CH3)-2′ (see, e.g., U.S. Patent Publication No. 2004/0171570); 4′-CH2 N(R)O-2′, wherein R is H, C1-C12 alkyl, or a protecting group (see, e.g., U.S. Pat. No. 7,427,672); 4′-CH2-C(H)(CH3)-2′ (see, e.g., Chattopadhyaya et al., J. Org. 30 Chem., 2009, 74, 118-134); and 4′-CH2-C(═CH2)-2′ (and analogs thereof; see, e.g., U.S. Pat. No. 8,278,426). The entire contents of each of the foregoing are hereby incorporated herein by reference.

[0149] Additional representative U.S. Patents and US Patent Publications that teach the preparation of locked nucleic acid nucleotides include, but are not limited to, the following: U.S. Pat. Nos. 6,268,490; 6,525,191; 6,670,461; 6,770,748; 6,794,499; 6,998,484; 7,053,207; 7,034,133; 7,084,125; 7,399,845; 7,427,672; 7,569,686; 7,741,457; 8,022,193; 8,030,467; 8,278,425; 8,278,426; 8,278,283; US 2008/0039618; and US 2009/0012281, the entire contents of each of which are hereby incorporated herein by reference.

[0150] Any of the foregoing bicyclic nucleosides can be prepared having one or more stereochemical sugar configurations including for example α-L-ribofuranose and j-D-ribofuranose (see WO 99/14226).

[0151] The RNA of an iRNA can also be modified to include one or more constrained ethyl nucleotides. As used herein, a “constrained ethyl nucleotide” or “cEt” is a locked nucleic acid comprising a bicyclic sugar moiety comprising a 4′-CH(CH3)-O-2′ bridge. In one embodiment, a constrained ethyl nucleotide is in the S conformation referred to herein as “S-cEt.”

[0152] An iRNA of the invention may also include one or more “conformationally restricted nucleotides” (“CRN”). CRN are nucleotide analogs with a linker connecting the C2′ and C4′ carbons of ribose or the C3 and —C5′ carbons of ribose. CRN lock the ribose ring into a stable conformation and increase the hybridization affinity to mRNA. The linker is of sufficient length to place the oxygen in an optimal position for stability and affinity resulting in less ribose ring puckering.

[0153] Representative publications that teach the preparation of certain of the above noted CRN include, but are not limited to, US Patent Publication No. 2013/0190383; and PCT publication WO 2013/036868, the entire contents of each of which are hereby incorporated herein by reference.

[0154] Potentially stabilizing modifications to the ends of RNA molecules can include N-(acetylaminocaproyl)-4-hydroxyprolinol (Hyp-C6-NHAc), N-(caproyl-4-hydroxyprolinol (Hyp-C6), N-(acetyl-4-hydroxyprolinol (Hyp-NHAc), thymidine-2′-O-deoxythymidine (ether), N-(aminocaproyl)-4-hydroxyprolinol (Hyp-C6-amino), 2-docosanoyl-uridine-3″-phosphate, inverted base dT(idT) and others. Disclosure of this modification can be found in PCT Publication No. WO 2011/005861.

[0155] Other modifications of the nucleotides of an iRNA of the invention include a 5′ phosphate or 5′ phosphate mimic, e.g., a 5′-terminal phosphate or phosphate mimic on the antisense strand of an RNAi agent. Suitable phosphate mimics are disclosed in, for example U.S. Patent Publication No. 2012/0157511, the entire contents of which are incorporated herein by reference.

A. Modified iRNAs Comprising Motifs of the Invention

[0156] In certain aspects of the invention, the double stranded RNAi agents of the invention include agents with chemical modifications as disclosed, for example, in U.S. Provisional Application No. 61/561,710, filed on Nov. 18, 2011, or in PCT/US2012/065691, filed on Nov. 16, 2012, the entire contents of each of which are incorporated herein by reference.

[0157] As shown herein, in Provisional Application No. 61/561,710, and in PCT/US2012/065691, a superior result may be obtained by introducing one or more motifs of three identical modifications on three consecutive nucleotides into a sense strand and/or antisense strand of a RNAi agent, particularly at or near the cleavage site. In some embodiments, the sense strand and antisense strand of the RNAi agent may otherwise be completely modified. The introduction of these motifs interrupts the modification pattern, if present, of the sense and/or antisense strand. The RNAi agent may be optionally conjugated with a GalNAc derivative ligand, for instance on the sense strand. The resulting RNAi agents present superior gene silencing activity.

[0158] More specifically, it has been surprisingly discovered that when the sense strand and antisense strand of the double stranded RNAi agent are modified to have one or more motifs of three identical modifications on three consecutive nucleotides at or near the cleavage site of at least one strand of an RNAi agent, the gene silencing activity of the RNAi agent was superiorly enhanced.

[0159] In one embodiment, the RNAi agent is a double ended bluntmer of 19 nucleotides in length, wherein the sense strand contains at least one motif of three 2′-F modifications on three consecutive nucleotides at positions 7, 8, 9 from the 5′ end. The antisense strand contains at least one motif of three 2′-O-methyl modifications on three consecutive nucleotides at positions 11, 12, 13 from the 5′ end.

[0160] In another embodiment, the RNAi agent is a double ended bluntmer of 20 nucleotides in length, wherein the sense strand contains at least one motif of three 2′-F modifications on three consecutive nucleotides at positions 8, 9, 10 from the 5′ end. The antisense strand contains at least one motif of three 2′-O-methyl modifications on three consecutive nucleotides at positions 11, 12, 13 from the 5′ end.

[0161] In yet another embodiment, the RNAi agent is a double ended bluntmer of 21 nucleotides in length, wherein the sense strand contains at least one motif of three 2′-F modifications on three consecutive nucleotides at positions 9, 10, 11 from the 5′ end. The antisense strand contains at least one motif of three 2′-O-methyl modifications on three consecutive nucleotides at positions 11, 12, 13 from the 5′ end.

[0162] In one embodiment, the RNAi agent comprises a 21 nucleotide sense strand and a 23 nucleotide antisense strand, wherein the sense strand contains at least one motif of three 2′-F modifications on three consecutive nucleotides at positions 9, 10, 11 from the 5′ end; the antisense strand contains at least one motif of three 2′-O-methyl modifications on three consecutive nucleotides at positions 11, 12, 13 from the 5′ end, wherein one end of the RNAi agent is blunt, while the other end comprises a 2 nucleotide overhang. Preferably, the 2 nucleotide overhang is at the 3′-end of the antisense strand. When the 2 nucleotide overhang is at the 3′-end of the antisense strand, there may be two phosphorothioate internucleotide linkages between the terminal three nucleotides, wherein two of the three nucleotides are the overhang nucleotides, and the third nucleotide is a paired nucleotide next to the overhang nucleotide. In one embodiment, the RNAi agent additionally has two phosphorothioate internucleotide linkages between the terminal three nucleotides at both the 5′-end of the sense strand and at the 5′-end of the antisense strand. In one embodiment, every nucleotide in the sense strand and the antisense strand of the RNAi agent, including the nucleotides that are part of the motifs are modified nucleotides. In one embodiment each residue is independently modified with a 2′-O-methyl or 3′-fluoro, e.g., in an alternating motif. Optionally, the RNAi agent further comprises a ligand (preferably GalNAc3).

[0163] In one embodiment, the RNAi agent comprises sense and antisense strands, wherein the RNAi agent comprises a first strand having a length which is at least 25 and at most 29 nucleotides and a second strand having a length which is at most 30 nucleotides with at least one motif of three 2′-O-methyl modifications on three consecutive nucleotides at position 11, 12, 13 from the 5′ end; wherein the 3′ end of the first strand and the 5′ end of the second strand form a blunt end and the second strand is 1-4 nucleotides longer at its 3′ end than the first strand, wherein the duplex region region which is at least 25 nucleotides in length, and the second strand is sufficiently complementary to a target mRNA along at least 19 nucleotide of the second strand length to reduce target gene expression when the RNAi agent is introduced into a mammalian cell, and wherein dicer cleavage of the RNAi agent preferentially results in an siRNA comprising the 3′ end of the second strand, thereby reducing expression of the target gene in the mammal. Optionally, the RNAi agent further comprises a ligand.

[0164] In one embodiment, the sense strand of the RNAi agent contains at least one motif of three identical modifications on three consecutive nucleotides, where one of the motifs occurs at the cleavage site in the sense strand.

[0165] In one embodiment, the antisense strand of the RNAi agent can also contain at least one motif of three identical modifications on three consecutive nucleotides, where one of the motifs occurs at or near the cleavage site in the antisense strand

[0166] For an RNAi agent having a duplex region of 17-23 nucleotides in length, the cleavage site of the antisense strand is typically around the 10, 11 and 12 positions from the 5′-end. Thus the motifs of three identical modifications may occur at the 9, 10, 11 positions; 10, 11, 12 positions; 11, 12, 13 positions; 12, 13, 14 positions; or 13, 14, 15 positions of the antisense strand, the count starting from the 1^{st} nucleotide from the 5′-end of the antisense strand, or, the count starting from the 1^{st} paired nucleotide within the duplex region from the 5′-end of the antisense strand. The cleavage site in the antisense strand may also change according to the length of the duplex region of the RNAi from the 5′-end.

[0167] The sense strand of the RNAi agent may contain at least one motif of three identical modifications on three consecutive nucleotides at the cleavage site of the strand; and the antisense strand may have at least one motif of three identical modifications on three consecutive nucleotides at or near the cleavage site of the strand. When the sense strand and the antisense strand form a dsRNA duplex, the sense strand and the antisense strand can be so aligned that one motif of the three nucleotides on the sense strand and one motif of the three nucleotides on the antisense strand have at least one nucleotide overlap, i.e., at least one of the three nucleotides of the motif in the sense strand forms a base pair with at least one of the three nucleotides of the motif in the antisense strand. Alternatively, at least two nucleotides may overlap, or all three nucleotides may overlap.

[0168] In one embodiment, the sense strand of the RNAi agent may contain more than one motif of three identical modifications on three consecutive nucleotides. The first motif may occur at or near the cleavage site of the strand and the other motifs may be a wing modification. The term “wing modification” herein refers to a motif occurring at another portion of the strand that is separated from the motif at or near the cleavage site of the same strand. The wing modification is either adjacent to the first motif or is separated by at least one or more nucleotides. When the motifs are immediately adjacent to each other then the chemistry of the motifs are distinct from each other and when the motifs are separated by one or more nucleotide than the chemistries can be the same or different. Two or more wing modifications may be present. For instance, when two wing modifications are present, each wing modification may occur at one end relative to the first motif which is at or near cleavage site or on either side of the lead motif.

[0169] Like the sense strand, the antisense strand of the RNAi agent may contain more than one motifs of three identical modifications on three consecutive nucleotides, with at least one of the motifs occurring at or near the cleavage site of the strand. This antisense strand may also contain one or more wing modifications in an alignment similar to the wing modifications that may be present on the sense strand.

[0170] In one embodiment, the wing modification on the sense strand or antisense strand of the RNAi agent typically does not include the first one or two terminal nucleotides at the 3′-end, 5′-end or both ends of the strand.

[0171] In another embodiment, the wing modification on the sense strand or antisense strand of the RNAi agent typically does not include the first one or two paired nucleotides within the duplex region at the 3′-end, 5′-end or both ends of the strand.

[0172] When the sense strand and the antisense strand of the RNAi agent each contain at least one wing modification, the wing modifications may fall on the same end of the duplex region, and have an overlap of one, two or three nucleotides.

[0173] When the sense strand and the antisense strand of the RNAi agent each contain at least two wing modifications, the sense strand and the antisense strand can be so aligned that two modifications each from one strand fall on one end of the duplex region, having an overlap of one, two or three nucleotides; two modifications each from one strand fall on the other end of the duplex region, having an overlap of one, two or three nucleotides; two modifications one strand fall on each side of the lead motif, having an overlap of one, two or three nucleotides in the duplex region.

[0174] In one embodiment, every nucleotide in the sense strand and antisense strand of the RNAi agent, including the nucleotides that are part of the motifs, may be modified. Each nucleotide may be modified with the same or different modification which can include one or more alteration of one or both of the non-linking phosphate oxygens and/or of one or more of the linking phosphate oxygens; alteration of a constituent of the ribose sugar, e.g., of the 2′ hydroxyl on the ribose sugar; wholesale replacement of the phosphate moiety with “dephospho” linkers; modification or replacement of a naturally occurring base; and replacement or modification of the ribose-phosphate backbone.

[0175] As nucleic acids are polymers of subunits, many of the modifications occur at a position which is repeated within a nucleic acid, e.g., a modification of a base, or a phosphate moiety, or a non-linking O of a phosphate moiety. In some cases the modification will occur at all of the subject positions in the nucleic acid but in many cases it will not. By way of example, a modification may only occur at a 3′ or 5′ terminal position, may only occur in a terminal region, e.g., at a position on a terminal nucleotide or in the last 2, 3, 4, 5, or 10 nucleotides of a strand. A modification may occur in a double strand region, a single strand region, or in both. A modification may occur only in the double strand region of an RNA or may only occur in a single strand region of a RNA. For example, a phosphorothioate modification at a non-linking O position may only occur at one or both termini, may only occur in a terminal region, e.g., at a position on a terminal nucleotide or in the last 2, 3, 4, 5, or 10 nucleotides of a strand, or may occur in double strand and single strand regions, particularly at termini. The 5′ end or ends can be phosphorylated.

[0176] It may be possible, e.g., to enhance stability, to include particular bases in overhangs, or to include modified nucleotides or nucleotide surrogates, in single strand overhangs, e.g., in a 5′ or 3′ overhang, or in both. For example, it can be desirable to include purine nucleotides in overhangs. In some embodiments all or some of the bases in a 3′ or 5′ overhang may be modified, e.g., with a modification described herein. Modifications can include, e.g., the use of modifications at the 2′ position of the ribose sugar with modifications that are known in the art, e.g., the use of deoxyribonucleotides, 2′-deoxy-2′-fluoro (2′-F) or 2′-O-methyl modified instead of the ribosugar of the nucleobase, and modifications in the phosphate group, e.g., phosphorothioate modifications. Overhangs need not be homologous with the target sequence.

[0177] In one embodiment, each residue of the sense strand and antisense strand is independently modified with LNA, HNA, CeNA, 2′-methoxyethyl, 2′-O-methyl, 2′-O-allyl, 2′-C-allyl, 2′-deoxy, 2′-hydroxyl, or 2′-fluoro. The strands can contain more than one modification. In one embodiment, each residue of the sense strand and antisense strand is independently modified with 2′-O-methyl or 2′-fluoro.

[0178] At least two different modifications are typically present on the sense strand and antisense strand. Those two modifications may be the 2′-O-methyl or 2′-fluoro modifications, or others.

[0179] In one embodiment, the Nₐ and/or N_{b} comprise modifications of an alternating pattern. The term “alternating motif” as used herein refers to a motif having one or more modifications, each modification occurring on alternating nucleotides of one strand. The alternating nucleotide may refer to one per every other nucleotide or one per every three nucleotides, or a similar pattern. For example, if A, B and C each represent one type of modification to the nucleotide, the alternating motif can be “ABABABABABAB . . . ,” “AABBAABBAABB . . . ,” “AABAABAABAAB . . . ,” “AAABAAABAAAB . . . ,” “AAABBBAAABBB . . . ,” or “ABCABCABCABC . . . ,” etc.

[0180] The type of modifications contained in the alternating motif may be the same or different. For example, if A, B, C, D each represent one type of modification on the nucleotide, the alternating pattern, i.e., modifications on every other nucleotide, may be the same, but each of the sense strand or antisense strand can be selected from several possibilities of modifications within the alternating motif such as “ABABAB . . . ”, “ACACAC . . . ” “BDBDBD . . . ” or “CDCDCD . . . ,” etc.

[0181] In one embodiment, the RNAi agent of the invention comprises the modification pattern for the alternating motif on the sense strand relative to the modification pattern for the alternating motif on the antisense strand is shifted. The shift may be such that the modified group of nucleotides of the sense strand corresponds to a differently modified group of nucleotides of the antisense strand and vice versa. For example, the sense strand when paired with the antisense strand in the dsRNA duplex, the alternating motif in the sense strand may start with “ABABAB” from 5′-3′ of the strand and the alternating motif in the antisense strand may start with “BABABA” from 5′-3′ of the strand within the duplex region. As another example, the alternating motif in the sense strand may start with “AABBAABB” from 5′-3′ of the strand and the alternating motif in the antisense strand may start with “BBAABBAA” from 5′-3′ of the strand within the duplex region, so that there is a complete or partial shift of the modification patterns between the sense strand and the antisense strand.

[0182] In one embodiment, the RNAi agent comprises the pattern of the alternating motif of 2′-O-methyl modification and 2′-F modification on the sense strand initially has a shift relative to the pattern of the alternating motif of 2′-O-methyl modification and 2′-F modification on the antisense strand initially, i.e., the 2′-O-methyl modified nucleotide on the sense strand base pairs with a 2′-F modified nucleotide on the antisense strand and vice versa. The 1 position of the sense strand may start with the 2′-F modification, and the 1 position of the antisense strand may start with the 2′-O-methyl modification.

[0183] The introduction of one or more motifs of three identical modifications on three consecutive nucleotides to the sense strand and/or antisense strand interrupts the initial modification pattern present in the sense strand and/or antisense strand. This interruption of the modification pattern of the sense and/or antisense strand by introducing one or more motifs of three identical modifications on three consecutive nucleotides to the sense and/or antisense strand surprisingly enhances the gene silencing activity to the target gene.

[0184] In one embodiment, when the motif of three identical modifications on three consecutive nucleotides is introduced to any of the strands, the modification of the nucleotide next to the motif is a different modification than the modification of the motif. For example, the portion of the sequence containing the motif is “ . . . NₐYYYN_{b} . . . ,” where “Y” represents the modification of the motif of three identical modifications on three consecutive nucleotide, and “Nₐ” and “N_{b}” represent a modification to the nucleotide next to the motif “YYY” that is different than the modification of Y, and where Nₐ and N_{b} can be the same or different modifications. Alternatively, Nₐ and/or N_{b} may be present or absent when there is a wing modification present.

[0185] The RNAi agent may further comprise at least one phosphorothioate or methylphosphonate internucleotide linkage. The phosphorothioate or methylphosphonate internucleotide linkage modification may occur on any nucleotide of the sense strand or antisense strand or both strands in any position of the strand. For instance, the internucleotide linkage modification may occur on every nucleotide on the sense strand and/or antisense strand; each internucleotide linkage modification may occur in an alternating pattern on the sense strand and/or antisense strand; or the sense strand or antisense strand may contain both internucleotide linkage modifications in an alternating pattern. The alternating pattern of the internucleotide linkage modification on the sense strand may be the same or different from the antisense strand, and the alternating pattern of the internucleotide linkage modification on the sense strand may have a shift relative to the alternating pattern of the internucleotide linkage modification on the antisense strand.

[0186] In one embodiment, the RNAi comprises a phosphorothioate or methylphosphonate internucleotide linkage modification in the overhang region. For example, the overhang region may contain two nucleotides having a phosphorothioate or methylphosphonate internucleotide linkage between the two nucleotides. Internucleotide linkage modifications also may be made to link the overhang nucleotides with the terminal paired nucleotides within the duplex region. For example, at least 2, 3, 4, or all the overhang nucleotides may be linked through phosphorothioate or methylphosphonate internucleotide linkage, and optionally, there may be additional phosphorothioate or methylphosphonate internucleotide linkages linking the overhang nucleotide with a paired nucleotide that is next to the overhang nucleotide. For instance, there may be at least two phosphorothioate internucleotide linkages between the terminal three nucleotides, in which two of the three nucleotides are overhang nucleotides, and the third is a paired nucleotide next to the overhang nucleotide. These terminal three nucleotides may be at the 3′-end of the antisense strand, the 3′-end of the sense strand, the 5′-end of the antisense strand, and/or the 5′ end of the antisense strand.

[0187] In one embodiment, the 2 nucleotide overhang is at the 3′-end of the antisense strand, and there are two phosphorothioate internucleotide linkages between the terminal three nucleotides, wherein two of the three nucleotides are the overhang nucleotides, and the third nucleotide is a paired nucleotide next to the overhang nucleotide. Optionally, the RNAi agent may additionally have two phosphorothioate internucleotide linkages between the terminal three nucleotides at both the 5′-end of the sense strand and at the 5′-end of the antisense strand.

[0188] In one embodiment, the RNAi agent comprises mismatch(es) with the target, within the duplex, or combinations thereof. A “mismatch” may be non-canonical base pairing or other than canonical pairing of nucleotides. The mismatch may occur in the overhang region or the duplex region. The base pair may be ranked on the basis of their propensity to promote dissociation or melting (e.g., on the free energy of association or dissociation of a particular pairing, the simplest approach is to examine the pairs on an individual pair basis, though next neighbor or similar analysis can also be used). In terms of promoting dissociation: A:U is preferred over G:C; G:U is preferred over G:C; and I:C is preferred over G:C (I=inosine). Mismatches, e.g., non-canonical or other than canonical pairings (as described elsewhere herein) are preferred over canonical (A:T, A:U, G:C) pairings; and pairings which include a universal base are preferred over canonical pairings. A “universal base” is a base that exhibits the ability to replace any of the four normal bases (G, C, A, and U) without significantly destabilizing neighboring base-pair interactions or disrupting the expected functional biochemical utility of the modified oligonucleotide. Non-limiting examples of universal bases include 2′-deoxyinosine (hypoxanthine deoxynucleotide) or its derivatives, nitroazole analogues, and hydrophobic aromatic non-hydrogen-bonding bases.

[0189] In one embodiment, the RNAi agent comprises at least one of the first 1, 2, 3, 4, or 5 base pairs within the duplex regions from the 5′-end of the antisense strand independently selected from the group of: A:U, G:U, I:C, and mismatched pairs, e.g., non-canonical or other than canonical pairings or pairings which include a universal base, to promote the dissociation of the antisense strand at the 5′-end of the duplex.

[0190] In one embodiment, the nucleotide at the 1 position within the duplex region from the 5′-end in the antisense strand is selected from the group consisting of A, dA, dU, U, and dT. Alternatively, at least one of the first 1, 2 or 3 base pair within the duplex region from the 5′-end of the antisense strand is an AU base pair. For example, the first base pair within the duplex region from the 5′-end of the antisense strand is an AU base pair.

[0191] In another embodiment, the nucleotide at the 3′-end of the sense strand is deoxy-thymine (dT). In another embodiment, the nucleotide at the 3′-end of the antisense strand is deoxy-thymine (dT). In one embodiment, there is a short sequence of deoxy-thymine nucleotides, for example, two dT nucleotides on the 3′-end of the sense and/or antisense strand.

[0192] In one embodiment, the sense strand sequence may be represented by formula (I):

5′nₚ-Nₐ-(XXX)ᵢ-N_{b}-YYY-N_{b}-(ZZZ)ⱼ-Nₐ-n_{q}3′ (I)
[0193] wherein:
[0194] i and j are each independently 0 or 1;
[0195] p and q are each independently 0-6;
[0196] each Nₐ independently represents an oligonucleotide sequence comprising 0-25 modified nucleotides, each sequence comprising at least two differently modified nucleotides;
[0197] each N_{b} independently represents an oligonucleotide sequence comprising 0-10 modified nucleotides;
[0198] each nₚ and n_{q} independently represent an overhang nucleotide;
[0199] wherein Nb and Y do not have the same modification; and
[0200] XXX, YYY and ZZZ each independently represent one motif of three identical modifications on three consecutive nucleotides. Preferably YYY is all 2′-F modified nucleotides.

[0201] In one embodiment, the Nₐ and/or N_{b} comprise modifications of alternating pattern.

[0202] In one embodiment, the YYY motif occurs at or near the cleavage site of the sense strand. For example, when the RNAi agent has a duplex region of 17-23 nucleotides in length, the YYY motif can occur at or the vicinity of the cleavage site (e.g.: can occur at positions 6, 7, 8, 7, 8, 9, 8, 9, 10, 9, 10, 11, 10, 11, 12 or 11, 12, 13) of
[0203] the sense strand, the count starting from the 1^{st} nucleotide, from the 5′-end; or optionally, the count starting at the 1^{st} paired nucleotide within the duplex region, from the 5′-end.

[0204] In one embodiment, i is 1 and j is 0, or i is 0 and j is 1, or both i and j are 1. The sense strand can therefore be represented by the following formulas:

5′nₚ-Nₐ-YYY-N_{b}-ZZZ-Nₐ-n_{q}3′ (Ib);

5′nₚ-Nₐ-XXX-N_{b}-YYY-Nₐ-n_{q}3′ (Ic); or

5′nₚ-Nₐ-XXX-N_{b}-YYY-N_{b}-ZZZ-Nₐ-n_{q}3′ (Id).

[0205] When the sense strand is represented by formula (Ib), N_{b} represents an oligonucleotide sequence comprising 0-10, 0-7, 0-5, 0-4, 0-2 or 0 modified nucleotides. Each Nₐ independently can represent an oligonucleotide sequence comprising 2-20, 2-15, or 2-10 modified nucleotides.

[0206] When the sense strand is represented as formula (Ic), N_{b} represents an oligonucleotide sequence comprising 0-10, 0-7, 0-10, 0-7, 0-5, 0-4, 0-2 or 0 modified nucleotides. Each Nₐ can independently represent an oligonucleotide sequence comprising 2-20, 2-15, or 2-10 modified nucleotides.

[0207] When the sense strand is represented as formula (Id), each N_{b} independently represents an oligonucleotide sequence comprising 0-10, 0-7, 0-5, 0-4, 0-2 or 0 modified nucleotides. Preferably, N_{b} is 0, 1, 2, 3, 4, 5 or 6 Each Nₐ can independently represent an oligonucleotide sequence comprising 2-20, 2-15, or 2-10 modified nucleotides.

[0208] Each of X, Y and Z may be the same or different from each other.

[0209] In other embodiments, i is 0 and j is 0, and the sense strand may be represented by the formula:

5′nₚ-Nₐ-YYY-Nₐ-n_{q}3′ (Ia).

[0210] When the sense strand is represented by formula (Ia), each Nₐ independently can represent an oligonucleotide sequence comprising 2-20, 2-15, or 2-10 modified nucleotides.

[0211] In one embodiment, the antisense strand sequence of the RNAi may be represented by formula (II):

5′n_{q′}-Nₐ′-(Z′Z′Z′)ₖ-N_{b}′-Y′Y′Y′-N_{b}′-(X′X′X′)ₗ-N′ₐ-nₚ′3′ (II)
[0212] wherein:
[0213] k and l are each independently 0 or 1;
[0214] p′ and q′ are each independently 0-6;
[0215] each Nₐ′ independently represents an oligonucleotide sequence comprising 0-25 modified nucleotides, each sequence comprising at least two differently modified nucleotides;
[0216] each N_{b}′ independently represents an oligonucleotide sequence comprising 0-10 modified nucleotides;
[0217] each nₚ′ and n_{q}′ independently represent an overhang nucleotide;
[0218] wherein N_{b}′ and Y′ do not have the same modification;
[0219] and
[0220] X′X′X′, Y′Y′Y′ and Z′Z′Z′ each independently represent one motif of three identical modifications on three consecutive nucleotides.

[0221] In one embodiment, the Nₐ′ and/or N_{b}′ comprise modifications of alternating pattern.

[0222] The Y′Y′Y′ motif occurs at or near the cleavage site of the antisense strand. For example, when the RNAi agent has a duplex region of 17-23 nucleotide in length, the Y′Y′Y′ motif can occur at positions 9, 10, 11; 10, 11, 12; 11, 12, 13; 12, 13, 14; or 13, 14, 15 of the antisense strand, with the count starting from the 1^{st} nucleotide, from the 5′-end; or optionally, the count starting at the 1^{st} paired nucleotide within the duplex region, from the 5′-end. Preferably, the Y′Y′Y′ motif occurs at positions 11, 12, 13.

[0223] In one embodiment, Y′Y′Y′ motif is all 2′-OMe modified nucleotides.

[0224] In one embodiment, k is 1 and l is 0, or k is 0 and l is 1, or both k and l are 1.

[0225] The antisense strand can therefore be represented by the following formulas:

5′n_{q}′-Nₐ′-Z′Z′Z′-N_{b}′-Y′Y′Y′-Nₐ′-nₚ′3′ (IIb);

5′n_{q}′-Nₐ′-Y′Y′Y′-N_{b}′-X′X′X′-nₚ,3′ (IIc); or

5′n_{q}′-Nₐ′-Z′Z′Z′-N_{b}′-Y′Y′Y′-N_{b}′-X′X′X′-Nₐ′-nₚ,3′ (IId).

[0226] When the antisense strand is represented by formula (IIb), N_{b}′ represents an oligonucleotide sequence comprising 0-10, 0-7, 0-10, 0-7, 0-5, 0-4, 0-2 or 0 modified nucleotides. Each Nₐ′ independently represents an oligonucleotide sequence comprising 2-20, 2-15, or 2-10 modified nucleotides.

[0227] When the antisense strand is represented as formula (IIc), N_{b}′ represents an oligonucleotide sequence comprising 0-10, 0-7, 0-10, 0-7, 0-5, 0-4, 0-2 or 0 modified nucleotides. Each Nₐ′ independently represents an oligonucleotide sequence comprising 2-20, 2-15, or 2-10 modified nucleotides.

[0228] When the antisense strand is represented as formula (IId), each N_{b}′ independently represents an oligonucleotide sequence comprising 0-10, 0-7, 0-10, 0-7, 0-5, 0-4, 0-2 or 0 modified nucleotides. Each Nₐ′ independently represents an oligonucleotide sequence comprising 2-20, 2-15, or 2-10 modified nucleotides. Preferably, N_{b} is 0, 1, 2, 3, 4, 5 or 6.

[0229] In other embodiments, k is 0 and 1 is 0 and the antisense strand may be represented by the formula:

5′n_{p′}-N_{a′}-Y′Y′Y′-N_{a′}-n_{q′}3′ (Ia).

[0230] When the antisense strand is represented as formula (IIa), each Nₐ′ independently represents an oligonucleotide sequence comprising 2-20, 2-15, or 2-10 modified nucleotides.

[0231] Each of X′, Y′ and Z′ may be the same or different from each other.

[0232] Each nucleotide of the sense strand and antisense strand may be independently modified with LNA, HNA, CeNA, 2′-methoxyethyl, 2′-O-methyl, 2′-O-allyl, 2′-C-allyl, 2′-hydroxyl, or 2′-fluoro. For example, each nucleotide of the sense strand and antisense strand is independently modified with 2′-O-methyl or 2′-fluoro. Each X, Y, Z, X′, Y′ and Z′, in particular, may represent a 2′-O-methyl modification or a 2′-fluoro modification.

[0233] In one embodiment, the sense strand of the RNAi agent may contain YYY motif occurring at 9, 10 and 11 positions of the strand when the duplex region is 21 nt, the count starting from the 1^{st} nucleotide from the 5′-end, or optionally, the count starting at the 1^{st} paired nucleotide within the duplex region, from the 5′-end; and Y represents 2′-F modification. The sense strand may additionally contain XXX motif or ZZZ motifs as wing modifications at the opposite end of the duplex region; and XXX and ZZZ each independently represents a 2′-OMe modification or 2′-F modification.

[0234] In one embodiment the antisense strand may contain Y′Y′Y′ motif occurring at positions 11, 12, 13 of the strand, the count starting from the 1^{st} nucleotide from the 5′-end, or optionally, the count starting at the 1^{st} paired nucleotide within the duplex region, from the 5′-end; and Y′ represents 2′-O-methyl modification. The antisense strand may additionally contain X′X′X′ motif or Z′Z′Z′ motifs as wing modifications at the opposite end of the duplex region; and X′X′X′ and Z′Z′Z′ each independently represents a 2′-OMe modification or 2′-F modification.

[0235] The sense strand represented by any one of the above formulas (Ia), (Ib), (Ic), and (Id) forms a duplex with a antisense strand being represented by any one of formulas (IIa), (IIb), (IIc), and (IId), respectively.

[0236] Accordingly, the RNAi agents for use in the methods of the invention may comprise a sense strand and an antisense strand, each strand having 14 to 30 nucleotides, the RNAi duplex represented by formula (III):

sense: 5′nₚ-Nₐ-(XXX)ᵢ-N_{b}-YYY-N_{b}-(ZZZ)ⱼ-Nₐ-n_{q}3′

antisense: 3′nₚ′-Nₐ′-(X′X′X′)ₖ-N_{b}′-Y′Y′Y′-N_{b}′-(Z′Z′Z′)ₗ-Nₐ′-n_{q}′5′ (III)
[0237] wherein:
[0238] i, j, k, and 1 are each independently 0 or 1;
[0239] p, p′, q, and q′ are each independently 0-6;
[0240] each Nₐ and Nₐ′ independently represents an oligonucleotide sequence comprising 0-25 modified nucleotides, each sequence comprising at least two differently modified nucleotides;
[0241] each N_{b} and N_{b}′ independently represents an oligonucleotide sequence comprising 0-10 modified nucleotides;
[0242] wherein
[0243] each nₚ′, nₚ, n_{q}′, and n_{q}, each of which may or may not be present, independently represents an overhang nucleotide; and
[0244] XXX, YYY, ZZZ, X′X′X′, Y′Y′Y′, and Z′Z′Z′ each independently represent one motif of three identical modifications on three consecutive nucleotides.

[0245] In one embodiment, i is 0 and j is 0; or i is 1 and j is 0; or i is 0 and j is 1; or both i and j are 0; or both i and j are 1. In another embodiment, k is 0 and l is 0; or k is 1 and l is 0; k is 0 and l is 1; or both k and l are 0; or both k and l are 1.

[0246] Exemplary combinations of the sense strand and antisense strand forming a RNAi duplex include the formulas below:

5′nₚ-Nₐ-YYY-Nₐ-n_{q}3′

3′nₚ′-Nₐ′-Y′Y′Y′-Nₐ′n_{q}′5′ (IIIa)

5′nₚ-Nₐ-YYY-N_{b}-ZZZ-Nₐ-n_{q}3′

3′nₚ′-Nₐ′-Y′Y′Y′-N_{b}′-Z′Z′Z′-Nₐ′n_{q}′5′ (IIIb)

5′nₚ-Nₐ-XXX-N_{b}-YYY-Nₐ-n_{q}3′

3′nₚ′-Nₐ′-X′X′X′-N_{b}′-Y′Y′Y′-Nₐ′-n_{q}′5′ (IIIc)

5′nₚ-Nₐ-XXX-N_{b}-YYY-N_{b}-ZZZ-Nₐ-n_{q}3′

3′nₚ′-Nₐ′-X′X′X′-N_{b}′-Y′Y′Y′-N_{b}′-Z′Z′Z′-Nₐ-n_{q}5′ (IIId)

5′-Nₐ-YYY-Nₐ-3′

3′nₚ′-Nₐ′-Y′Y′Y′-Nₐ′5′ (IIIe)

[0247] When the RNAi agent is represented by formula (IIIa), each Nₐ independently represents an oligonucleotide sequence comprising 2-20, 2-15, or 2-10 modified nucleotides.

[0248] When the RNAi agent is represented by formula (IIIb), each N_{b} independently represents an oligonucleotide sequence comprising 1-10, 1-7, 1-5 or 1-4 modified nucleotides. Each Nₐ independently represents an oligonucleotide sequence comprising 2-20, 2-15, or 2-10 modified nucleotides.

[0249] When the RNAi agent is represented as formula (IIIc), each N_{b}, N_{b}′ independently represents an oligonucleotide sequence comprising 0-10, 0-7, 0-10, 0-7, 0-5, 0-4, 0-2 or 0 modified nucleotides. Each Nₐ independently represents an oligonucleotide sequence comprising 2-20, 2-15, or 2-10 modified nucleotides.

[0250] When the RNAi agent is represented as formula (IIId), each N_{b}, N_{b}′ independently represents an oligonucleotide sequence comprising 0-10, 0-7, 0-10, 0-7, 0-5, 0-4, 0-2 or 0 modified nucleotides. Each Nₐ, Nₐ′ independently represents an oligonucleotide sequence comprising 2-20, 2-15, or 2-10 modified nucleotides. Each of Nₐ, Nₐ′, N_{b} and N_{b} independently comprises modifications of alternating pattern.

[0251] When the RNAi agent is represented as formula (IIId), each N_{b}, N_{b}′ independently represents an oligonucleotide sequence comprising 0-10, 0-7, 0-10, 0-7, 0-5, 0-4, 0-2 or 0 modified nucleotides. Each Nₐ, Nₐ′ independently represents an oligonucleotide sequence comprising 2-20, 2-15, or 2-10 modified nucleotides. Each of Nₐ, Nₐ′, N_{b} and N_{b} independently comprises modifications of alternating pattern.

[0252] When the RNAi agent is represented as formula (IIIe), each Nₐ and Nₐ′ independently represents an oligonucleotide sequence comprising 0-25 nucleotides which are either modified or unmodified or combinations thereof, each sequence comprising at least two differently modified nucleotides.

[0253] Each of X, Y and Z in formulas (III), (IIIa), (IIIb), (IIIc), (IIId), and (IIIe) may be the same or different from each other.

[0254] When the RNAi agent is represented by formula (III), (IIIa), (IIIb), (IIIc), (IIId), and (IIIe) at least one of the Y nucleotides may form a base pair with one of the Y′ nucleotides. Alternatively, at least two of the Y nucleotides form base pairs with the corresponding Y′ nucleotides; or all three of the Y nucleotides all form base pairs with the corresponding Y′ nucleotides.

[0255] When the RNAi agent is represented by formula (IIIb) or (IIId), at least one of the Z nucleotides may form a base pair with one of the Z′ nucleotides. Alternatively, at least two of the Z nucleotides form base pairs with the corresponding Z′ nucleotides; or all three of the Z nucleotides all form base pairs with the corresponding Z′ nucleotides.

[0256] When the RNAi agent is represented as formula (IIIc) or (IIId), at least one of the X nucleotides may form a base pair with one of the X′ nucleotides. Alternatively, at least two of the X nucleotides form base pairs with the corresponding X′ nucleotides; or all three of the X nucleotides all form base pairs with the corresponding X′ nucleotides.

[0257] In one embodiment, the modification on the Y nucleotide is different than the modification on the Y′ nucleotide, the modification on the Z nucleotide is different than the modification on the Z′ nucleotide, and/or the modification on the X nucleotide is different than the modification on the X′ nucleotide.

[0258] In one embodiment, when the RNAi agent is represented by formula (IIId), the Nₐ modifications are 2′-O-methyl or 2′-fluoro modifications. In another embodiment, when the RNAi agent is represented by formula (IIId), the Nₐ modifications are 2′-O-methyl or 2′-fluoro modifications and nₚ′>0 and at least one nₚ′ is linked to a neighboring nucleotide a via phosphorothioate linkage. In yet another embodiment, when the RNAi agent is represented by formula (IIId), the Nₐ modifications are 2′-O-methyl or 2′-fluoro modifications, nₚ′>0 and at least one nₚ′ is linked to a neighboring nucleotide via phosphorothioate linkage, and the sense strand is conjugated to one or more GalNAc derivatives attached through a monovalent, a bivalent or a trivalent branched linker. In another embodiment, when the RNAi agent is represented by formula (IIId), the Nₐ modifications are 2′-O-methyl or 2′-fluoro modifications, nₚ′>0 and at least one nₚ′ is linked to a neighboring nucleotide via phosphorothioate linkage, the sense strand comprises at least one phosphorothioate linkage, and the sense strand is conjugated to one or more GalNAc derivatives attached through a monovalent, a bivalent or a trivalent branched linker.

[0259] In one embodiment, when the RNAi agent is represented by formula (IIIa), the Nₐ modifications are 2′-O-methyl or 2′-fluoro modifications, nₚ′>0 and at least one nₚ′ is linked to a neighboring nucleotide via phosphorothioate linkage, the sense strand comprises at least one phosphorothioate linkage, and the sense strand is conjugated to one or more GalNAc derivatives attached through a monovalent, a bivalent or a trivalent branched linker.

[0260] In one embodiment, the RNAi agent is a multimer containing at least two duplexes represented by formula (III), (IIIa), (IIIb), (IIIc), (IIId), and (IIIe), wherein the duplexes are connected by a linker. The linker can be cleavable or non-cleavable. Optionally, the multimer further comprises a ligand. Each of the duplexes can target the same gene or two different genes; or each of the duplexes can target same gene at two different target sites.

[0261] In one embodiment, the RNAi agent is a multimer containing three, four, five, six or more duplexes represented by formula (III), (IIIa), (IIIb), (IIIc), (IIId), and (IIIe), wherein the duplexes are connected by a linker. The linker can be cleavable or non-cleavable. Optionally, the multimer further comprises a ligand. Each of the duplexes can target the same gene or two different genes; or each of the duplexes can target same gene at two different target sites.

[0262] In one embodiment, two RNAi agents represented by formula (III), (IIIa), (IIIb), (IIIc), (IIId), and (IIIe) are linked to each other at the 5′ end, and one or both of the 3′ ends and are optionally conjugated to a ligand. Each of the agents can target the same gene or two different genes; or each of the agents can target same gene at two different target sites.

[0263] Various publications describe multimeric RNAi agents that can be used in the methods of the invention. Such publications include WO2007/091269, U.S. Pat. No. 7,858,769, WO2010/141511, WO2007/117686, WO2009/014887 and WO2011/031520 the entire contents of each of which are hereby incorporated herein by reference.

[0264] The RNAi agent that contains conjugations of one or more carbohydrate moieties to a RNAi agent can optimize one or more properties of the RNAi agent. In many cases, the carbohydrate moiety will be attached to a modified subunit of the RNAi agent. For example, the ribose sugar of one or more ribonucleotide subunits of a dsRNA agent can be replaced with another moiety, e.g., a non-carbohydrate (preferably cyclic) carrier to which is attached a carbohydrate ligand. A ribonucleotide subunit in which the ribose sugar of the subunit has been so replaced is referred to herein as a ribose replacement modification subunit (RRMS). A cyclic carrier may be a carbocyclic ring system, i.e., all ring atoms are carbon atoms, or a heterocyclic ring system, i.e., one or more ring atoms may be a heteroatom, e.g., nitrogen, oxygen, sulfur. The cyclic carrier may be a monocyclic ring system, or may contain two or more rings, e.g. fused rings. The cyclic carrier may be a fully saturated ring system, or it may contain one or more double bonds.

[0265] The ligand may be attached to the polynucleotide via a carrier. The carriers include (i) at least one “backbone attachment point,” preferably two “backbone attachment points” and (ii) at least one “tethering attachment point.” A “backbone attachment point” as used herein refers to a functional group, e.g. a hydroxyl group, or generally, a bond available for, and that is suitable for incorporation of the carrier into the backbone, e.g., the phosphate, or modified phosphate, e.g., sulfur containing, backbone, of a ribonucleic acid. A “tethering attachment point” (TAP) in some embodiments refers to a constituent ring atom of the cyclic carrier, e.g., a carbon atom or a heteroatom (distinct from an atom which provides a backbone attachment point), that connects a selected moiety. The moiety can be, e.g., a carbohydrate, e.g. monosaccharide, disaccharide, trisaccharide, tetrasaccharide, oligosaccharide and polysaccharide. Optionally, the selected moiety is connected by an intervening tether to the cyclic carrier. Thus, the cyclic carrier will often include a functional group, e.g., an amino group, or generally, provide a bond, that is suitable for incorporation or tethering of another chemical entity, e.g., a ligand to the constituent ring.

[0266] The RNAi agents may be conjugated to a ligand via a carrier, wherein the carrier can be cyclic group or acyclic group; preferably, the cyclic group is selected from pyrrolidinyl, pyrazolinyl, pyrazolidinyl, imidazolinyl, imidazolidinyl, piperidinyl, piperazinyl, [1,3]dioxolane, oxazolidinyl, isoxazolidinyl, morpholinyl, thiazolidinyl, isothiazolidinyl, quinoxalinyl, pyridazinonyl, tetrahydrofuryl and and decalin; preferably, the acyclic group is selected from serinol backbone or diethanolamine backbone.

[0267] In certain specific embodiments, the RNAi agent for use in the methods of the invention is an agent selected from the group of agents listed in any one of Tables 3A, 3B, 4A, 4B, 6, and 7. These agents may further comprise a ligand.

### IV. iRNAs Conjugated to Ligands

[0268] Another modification of the RNA of an iRNA of the invention involves chemically linking to the RNA one or more ligands, moieties or conjugates that enhance the activity, cellular distribution or cellular uptake of the iRNA. Such moieties include but are not limited to lipid moieties such as a cholesterol moiety (Letsinger et al., Proc. Natl. Acid. Sci. USA, 1989, 86: 6553-6556), cholic acid (Manoharan et al., Biorg. Med. Chem. Let., 1994, 4:1053-1060), a thioether, e.g., beryl-S-tritylthiol (Manoharan et al., Ann. N.Y. Acad. Sci., 1992, 660:306-309; Manoharan et al., Biorg. Med. Chem. Let., 1993, 3:2765-2770), a thiocholesterol (Oberhauser et al., Nucl. Acids Res., 1992, 20:533-538), an aliphatic chain, e.g., dodecandiol or undecyl residues (Saison-Behmoaras et al., EMBO J, 1991, 10:1111-1118; Kabanov et al., FEBS Lett., 1990, 259:327-330; Svinarchuk et al., Biochimie, 1993, 75:49-54), a phospholipid, e.g., di-hexadecyl-rac-glycerol or triethyl-ammonium 1,2-di-O-hexadecyl-rac-glycero-3-phosphonate (Manoharan et al., Tetrahedron Lett., 1995, 36:3651-3654; Shea et al., Nucl. Acids Res., 1990, 18:3777-3783), a polyamine or a polyethylene glycol chain (Manoharan et al., Nucleosides & Nucleotides, 1995, 14:969-973), or adamantane acetic acid (Manoharan et al., Tetrahedron Lett., 1995, 36:3651-3654), a palmityl moiety (Mishra et al., Biochim. Biophys. Acta, 1995, 1264:229-237), or an octadecylamine or hexylamino-carbonyloxycholesterol moiety (Crooke et al., J. Pharmacol. Exp. Ther., 1996, 277:923-937).

[0269] In one embodiment, a ligand alters the distribution, targeting or lifetime of an iRNA agent into which it is incorporated. In preferred embodiments a ligand provides an enhanced affinity for a selected target, e.g., molecule, cell or cell type, compartment, e.g., a cellular or organ compartment, tissue, organ or region of the body, as, e.g., compared to a species absent such a ligand. Preferred ligands will not take part in duplex pairing in a duplexed nucleic acid.

[0270] Ligands can include a naturally occurring substance, such as a protein (e.g., human serum albumin (HSA), low-density lipoprotein (LDL), or globulin); carbohydrate (e.g., a dextran, pullulan, chitin, chitosan, inulin, cyclodextrin, N-acetylgalactosamine, or hyaluronic acid); or a lipid. The ligand can also be a recombinant or synthetic molecule, such as a synthetic polymer, e.g., a synthetic polyamino acid. Examples of polyamino acids include polyamino acid is a polylysine (PLL), poly L-aspartic acid, poly L-glutamic acid, styrene-maleic acid anhydride copolymer, poly(L-lactide-co-glycolied) copolymer, divinyl ether-maleic anhydride copolymer, N-(2-hydroxypropyl)methacrylamide copolymer (HMPA), polyethylene glycol (PEG), polyvinyl alcohol (PVA), polyurethane, poly(2-ethylacryllic acid), N-isopropylacrylamide polymers, or polyphosphazine. Example of polyamines include: polyethylenimine, polylysine (PLL), spermine, spermidine, polyamine, pseudopeptide-polyamine, peptidomimetic polyamine, dendrimer polyamine, arginine, amidine, protamine, cationic lipid, cationic porphyrin, quaternary salt of a polyamine, or an alpha helical peptide.

[0271] Ligands can also include targeting groups, e.g., a cell or tissue targeting agent, e.g., a lectin, glycoprotein, lipid or protein, e.g., an antibody, that binds to a specified cell type such as a kidney cell. A targeting group can be a thyrotropin, melanotropin, lectin, glycoprotein, surfactant protein A, Mucin carbohydrate, multivalent lactose, monovalent or multivalent galactose, N-acetyl-galactosamine, N-acetyl-gulucoseamine multivalent mannose, multivalent fucose, glycosylated polyaminoacids, transferrin, bisphosphonate, polyglutamate, polyaspartate, a lipid, cholesterol, a steroid, bile acid, folate, vitamin B12, vitamin A, biotin, or an RGD peptide or RGD peptide mimetic. In certain embodiments, ligands include monovalent or multivalent galactose. In certain embodiments, ligands include cholesterol.

[0272] Other examples of ligands include dyes, intercalating agents (e.g. acridines), cross-linkers (e.g. psoralene, mitomycin C), porphyrins (TPPC4, texaphyrin, Sapphyrin), polycyclic aromatic hydrocarbons (e.g., phenazine, dihydrophenazine), artificial endonucleases (e.g. EDTA), lipophilic molecules, e.g., cholesterol, cholic acid, adamantane acetic acid, 1-pyrene butyric acid, dihydrotestosterone, 1,3-Bis-O(hexadecyl)glycerol, geranyloxyhexyl group, hexadecylglycerol, borneol, menthol, 1,3-propanediol, heptadecyl group, palmitic acid, myristic acid, O3-(oleoyl)lithocholic acid, O3-(oleoyl)cholenic acid, dimethoxytrityl, or phenoxazine) and peptide conjugates (e.g., antennapedia peptide, Tat peptide), alkylating agents, phosphate, amino, mercapto, PEG (e.g., PEG-40K), MPEG, [MPEG]₂, polyamino, alkyl, substituted alkyl, radiolabeled markers, enzymes, haptens (e.g. biotin), transport/absorption facilitators (e.g., aspirin, vitamin E, folic acid), synthetic ribonucleases (e.g., imidazole, bisimidazole, histamine, imidazole clusters, acridine-imidazole conjugates, Eu3+ complexes of tetraazamacrocycles), dinitrophenyl, HRP, or AP.

[0273] Ligands can be proteins, e.g., glycoproteins, or peptides, e.g., molecules having a specific affinity for a co-ligand, or antibodies e.g., an antibody, that binds to a specified cell type such as a hepatic cell. Ligands can also include hormones and hormone receptors. They can also include non-peptidic species, such as lipids, lectins, carbohydrates, vitamins, cofactors, multivalent lactose, multivalent galactose, N-acetyl-galactosamine, N-acetyl-gulucosamine multivalent mannose, or multivalent fucose. The ligand can be, for example, a lipopolysaccharide, an activator of p38 MAP kinase, or an activator of NF-κB.

[0274] The ligand can be a substance, e.g., a drug, which can increase the uptake of the iRNA agent into the cell, for example, by disrupting the cell's cytoskeleton, e.g., by disrupting the cell's microtubules, microfilaments, and/or intermediate filaments. The drug can be, for example, taxon, vincristine, vinblastine, cytochalasin, nocodazole, japlakinolide, latrunculin A, phalloidin, swinholide A, indanocine, or myoservin.

[0275] In some embodiments, a ligand attached to an iRNA as described herein acts as a pharmacokinetic modulator (PK modulator). PK modulators include lipophiles, bile acids, steroids, phospholipid analogues, peptides, protein binding agents, PEG, vitamins etc. Exemplary PK modulators include, but are not limited to, cholesterol, fatty acids, cholic acid, lithocholic acid, dialkylglycerides, diacylglyceride, phospholipids, sphingolipids, naproxen, ibuprofen, vitamin E, biotin etc. Oligonucleotides that comprise a number of phosphorothioate linkages are also known to bind to serum protein, thus short oligonucleotides, e.g., oligonucleotides of about 5 bases, 10 bases, 15 bases or 20 bases, comprising multiple of phosphorothioate linkages in the backbone are also amenable to the present invention as ligands (e.g. as PK modulating ligands). In addition, aptamers that bind serum components (e.g. serum proteins) are also suitable for use as PK modulating ligands in the embodiments described herein.

[0276] Ligand-conjugated oligonucleotides of the invention may be synthesized by the use of an oligonucleotide that bears a pendant reactive functionality, such as that derived from the attachment of a linking molecule onto the oligonucleotide (described below). This reactive oligonucleotide may be reacted directly with commercially-available ligands, ligands that are synthesized bearing any of a variety of protecting groups, or ligands that have a linking moiety attached thereto.

[0277] The oligonucleotides used in the conjugates of the present invention may be conveniently and routinely made through the well-known technique of solid-phase synthesis. Equipment for such synthesis is sold by several vendors including, for example, Applied Biosystems (Foster City, Calif.). Any other means for such synthesis known in the art may additionally or alternatively be employed. It is also known to use similar techniques to prepare other oligonucleotides, such as the phosphorothioates and alkylated derivatives.

[0278] In the ligand-conjugated oligonucleotides and ligand-molecule bearing sequence-specific linked nucleosides of the present invention, the oligonucleotides and oligonucleosides may be assembled on a suitable DNA synthesizer utilizing standard nucleotide or nucleoside precursors, or nucleotide or nucleoside conjugate precursors that already bear the linking moiety, ligand-nucleotide or nucleoside-conjugate precursors that already bear the ligand molecule, or non-nucleoside ligand-bearing building blocks.

[0279] When using nucleotide-conjugate precursors that already bear a linking moiety, the synthesis of the sequence-specific linked nucleosides is typically completed, and the ligand molecule is then reacted with the linking moiety to form the ligand-conjugated oligonucleotide. In some embodiments, the oligonucleotides or linked nucleosides of the present invention are synthesized by an automated synthesizer using phosphoramidites derived from ligand-nucleoside conjugates in addition to the standard phosphoramidites and non-standard phosphoramidites that are commercially available and routinely used in oligonucleotide synthesis.

### A. Lipid Conjugates

[0280] In one embodiment, the ligand or conjugate is a lipid or lipid-based molecule. Such a lipid or lipid-based molecule preferably binds a serum protein, e.g., human serum albumin (HSA). An HSA binding ligand allows for distribution of the conjugate to a target tissue, e.g., a non-kidney target tissue of the body. For example, the target tissue can be the liver, including parenchymal cells of the liver. Other molecules that can bind HSA can also be used as ligands. For example, naproxen or aspirin can be used. A lipid or lipid-based ligand can (a) increase resistance to degradation of the conjugate, (b) increase targeting or transport into a target cell or cell membrane, and/or (c) can be used to adjust binding to a serum protein, e.g., HSA.

[0281] A lipid based ligand can be used to inhibit, e.g., control the binding of the conjugate to a target tissue. For example, a lipid or lipid-based ligand that binds to HSA more strongly will be less likely to be targeted to the kidney and therefore less likely to be cleared from the body. A lipid or lipid-based ligand that binds to HSA less strongly can be used to target the conjugate to the kidney.

[0282] In a preferred embodiment, the lipid based ligand binds HSA. Preferably, it binds HSA with a sufficient affinity such that the conjugate will be preferably distributed to a non-kidney tissue. However, it is preferred that the affinity not be so strong that the HSA-ligand binding cannot be reversed.

[0283] In another preferred embodiment, the lipid based ligand binds HSA weakly or not at all, such that the conjugate will be preferably distributed to the kidney. Other moieties that target to kidney cells can also be used in place of or in addition to the lipid based ligand.

[0284] In another aspect, the ligand is a moiety, e.g., a vitamin, which is taken up by a target cell, e.g., a proliferating cell. These are particularly useful for treating disorders characterized by unwanted cell proliferation, e.g., of the malignant or non-malignant type, e.g., cancer cells. Exemplary vitamins include vitamin A, E, and K. Other exemplary vitamins include are B vitamin, e.g., folic acid, B12, riboflavin, biotin, pyridoxal or other vitamins or nutrients taken up by target cells such as liver cells. Also included are HSA and low density lipoprotein (LDL).

### B. Cell Permeation Agents

[0285] In another aspect, the ligand is a cell-permeation agent, preferably a helical cell-permeation agent. Preferably, the agent is amphipathic. An exemplary agent is a peptide such as tat or antennopedia. If the agent is a peptide, it can be modified, including a peptidylmimetic, invertomers, non-peptide or pseudo-peptide linkages, and use of D-amino acids. The helical agent is preferably an alpha-helical agent, which preferably has a lipophilic and a lipophobic phase.

[0286] The ligand can be a peptide or peptidomimetic. A peptidomimetic (also referred to herein as an oligopeptidomimetic) is a molecule capable of folding into a defined three-dimensional structure similar to a natural peptide. The attachment of peptide and peptidomimetics to iRNA agents can affect pharmacokinetic distribution of the iRNA, such as by enhancing cellular recognition and absorption. The peptide or peptidomimetic moiety can be about 5-50 amino acids long, e.g., about 5, 10, 15, 20, 25, 30, 35, 40, 45, or 50 amino acids long.

[0287] A peptide or peptidomimetic can be, for example, a cell permeation peptide, cationic peptide, amphipathic peptide, or hydrophobic peptide (e.g., consisting primarily of Tyr, Trp or Phe). The peptide moiety can be a dendrimer peptide, constrained peptide or crosslinked peptide. In another alternative, the peptide moiety can include a hydrophobic membrane translocation sequence (MTS). An exemplary hydrophobic MTS-containing peptide is RFGF having the amino acid sequence AAVALLPAVLLALLAP (SEQ ID NO: 9). An RFGF analogue (e.g., amino acid sequence AALLPVLLAAP (SEQ ID NO: 10) containing a hydrophobic MTS can also be a targeting moiety. The peptide moiety can be a “delivery” peptide, which can carry large polar molecules including peptides, oligonucleotides, and protein across cell membranes. For example, sequences from the HIV Tat protein (GRKKRRQRRRPPQ (SEQ ID NO: 11) and the Drosophila Antennapedia protein (RQIKIWFQNRRMKWKK (SEQ ID NO: 12) have been found to be capable of functioning as delivery peptides. A peptide or peptidomimetic can be encoded by a random sequence of DNA, such as a peptide identified from a phage-display library, or one-bead-one-compound (OBOC) combinatorial library (Lam et al., Nature, 354:82-84, 1991). Examples of a peptide or peptidomimetic tethered to a dsRNA agent via an incorporated monomer unit for cell targeting purposes is an arginine-glycine-aspartic acid (RGD)-peptide, or RGD mimic. A peptide moiety can range in length from about 5 amino acids to about 40 amino acids. The peptide moieties can have a structural modification, such as to increase stability or direct conformational properties. Any of the structural modifications described below can be utilized.

[0288] An RGD peptide for use in the compositions and methods of the invention may be linear or cyclic, and may be modified, e.g., glycosylated or methylated, to facilitate targeting to a specific tissue(s). RGD-containing peptides and peptidiomimemtics may include D-amino acids, as well as synthetic RGD mimics. In addition to RGD, one can use other moieties that target the integrin ligand. Preferred conjugates of this ligand target PECAM-1 or VEGF.

[0289] A “cell permeation peptide” is capable of permeating a cell, e.g., a microbial cell, such as a bacterial or fungal cell, or a mammalian cell, such as a human cell. A microbial cell-permeating peptide can be, for example, a α-helical linear peptide (e.g., LL-37 or Ceropin P1), a disulfide bond-containing peptide (e.g., α-defensin, β-defensin or bactenecin), or a peptide containing only one or two dominating amino acids (e.g., PR-39 or indolicidin). A cell permeation peptide can also include a nuclear localization signal (NLS). For example, a cell permeation peptide can be a bipartite amphipathic peptide, such as MPG, which is derived from the fusion peptide domain of HIV-1 gp41 and the NLS of SV40 large T antigen (Simeoni et al., Nucl. Acids Res. 31:2717-2724, 2003).

### C. Carbohydrate Conjugates

[0290] In some embodiments of the compositions and methods of the invention, an iRNA oligonucleotide further comprises a carbohydrate. The carbohydrate conjugated iRNA are advantageous for the in vivo delivery of nucleic acids, as well as compositions suitable for in vivo therapeutic use, as described herein. As used herein, “carbohydrate” refers to a compound which is either a carbohydrate per se made up of one or more monosaccharide units having at least 6 carbon atoms (which can be linear, branched or cyclic) with an oxygen, nitrogen or sulfur atom bonded to each carbon atom; or a compound having as a part thereof a carbohydrate moiety made up of one or more monosaccharide units each having at least six carbon atoms (which can be linear, branched or cyclic), with an oxygen, nitrogen or sulfur atom bonded to each carbon atom. Representative carbohydrates include the sugars (mono-, di-, tri- and oligosaccharides containing from about 4, 5, 6, 7, 8, or 9 monosaccharide units), and polysaccharides such as starches, glycogen, cellulose and polysaccharide gums. Specific monosaccharides include C5 and above (e.g., C5, C6, C7, or C8) sugars; di- and trisaccharides include sugars having two or three monosaccharide units (e.g., C5, C6, C7, or C8).

[0291] In one embodiment, a carbohydrate conjugate for use in the compositions and methods of the invention is a monosaccharide. In another embodiment, a carbohydrate conjugate for use in the compositions and methods of the invention is selected from the group consisting of:

[chemical structure]

[chemical structure]

[chemical structure]

[chemical structure]

[0292] In one embodiment, the monosaccharide is an N-acetylgalactosamine, such as

[chemical structure]

[0293] Another representative carbohydrate conjugate for use in the embodiments described herein includes, but is not limited to,

[chemical structure]

[0294] when one of X or Y is an oligonucleotide, the other is a hydrogen.

[0295] In certain embodiments of the invention, the GalNAc or GalNAc derivative is attached to an iRNA agent of the invention via a monovalent linker. In some embodiments, the GalNAc or GalNAc derivative is attached to an iRNA agent of the invention via a bivalent linker. In yet other embodiments of the invention, the GalNAc or GalNAc derivative is attached to an iRNA agent of the invention via a trivalent linker.

[0296] In one embodiment, the double stranded RNAi agents of the invention comprise one GalNAc or GalNAc derivative attached to the iRNA agent. In another embodiment, the double stranded RNAi agents of the invention comprise a plurality (e.g., 2, 3, 4, 5, or 6) GalNAc or GalNAc derivatives, each independently attached to a plurality of nucleotides of the double stranded RNAi agent through a plurality of monovalent linkers.

[0297] In some embodiments, for example, when the two strands of an iRNA agent of the invention are part of one larger molecule connected by an uninterrupted chain of nucleotides between the 3′-end of one strand and the 5′-end of the respective other strand forming a hairpin loop comprising, a plurality of unpaired nucleotides, each unpaired nucleotide within the hairpin loop may independently comprise a GalNAc or GalNAc derivative attached via a monovalent linker. The hairpin loop may also be formed by an extended overhang in one strand of the duplex.

[0298] In some embodiments, the carbohydrate conjugate further comprises one or more additional ligands as described above, such as, but not limited to, a PK modulator and/or a cell permeation peptide.

[0299] Additional carbohydrate conjugates suitable for use in the present invention include those described in PCT Publication Nos. WO 2014/179620 and WO 2014/179627, the entire contents of each of which are incorporated herein by reference.

### D. Linkers

[0300] In some embodiments, the conjugate or ligand described herein can be attached to an iRNA oligonucleotide with various linkers that can be cleavable or non-cleavable.

[0301] The term “linker” or “linking group” means an organic moiety that connects two parts of a compound, e.g., covalently attaches two parts of a compound. Linkers typically comprise a direct bond or an atom such as oxygen or sulfur, a unit such as NR8, C(O), C(O)NH, SO, SO₂, SO₂NH or a chain of atoms, such as, but not limited to, substituted or unsubstituted alkyl, substituted or unsubstituted alkenyl, substituted or unsubstituted alkynyl, arylalkyl, arylalkenyl, arylalkynyl, heteroarylalkyl, heteroarylalkenyl, heteroarylalkynyl, heterocyclylalkyl, heterocyclylalkenyl, heterocyclylalkynyl, aryl, heteroaryl, heterocyclyl, cycloalkyl, cycloalkenyl, alkylarylalkyl, alkylarylalkenyl, alkylarylalkynyl, alkenylarylalkyl, alkenylarylalkenyl, alkenylarylalkynyl, alkynylarylalkyl, alkynylarylalkenyl, alkynylarylalkynyl, alkylheteroarylalkyl, alkylheteroarylalkenyl, alkylheteroarylalkynyl, alkenylheteroarylalkyl, alkenylheteroarylalkenyl, alkenylheteroarylalkynyl, alkynylheteroarylalkyl, alkynylheteroarylalkenyl, alkynylheteroarylalkynyl, alkylheterocyclylalkyl, alkylheterocyclylalkenyl, alkylhererocyclylalkynyl, alkenylheterocyclylalkyl, alkenylheterocyclylalkenyl, alkenylheterocyclylalkynyl, alkynylheterocyclylalkyl, alkynylheterocyclylalkenyl, alkynylheterocyclylalkynyl, alkylaryl, alkenylaryl, alkynylaryl, alkylheteroaryl, alkenylheteroaryl, alkynylhereroaryl, which one or more methylenes can be interrupted or terminated by O, S, S(O), SO₂, N(R8), C(O), substituted or unsubstituted aryl, substituted or unsubstituted heteroaryl, substituted or unsubstituted heterocyclic; where R8 is hydrogen, acyl, aliphatic or substituted aliphatic. In one embodiment, the linker is between about 1-24 atoms, 2-24, 3-24, 4-24, 5-24, 6-24, 6-18, 7-18, 8-18 atoms, 7-17, 8-17, 6-16, 7-16, or 8-16 atoms.

[0302] A cleavable linking group is one which is sufficiently stable outside the cell, but which upon entry into a target cell is cleaved to release the two parts the linker is holding together. In a preferred embodiment, the cleavable linking group is cleaved at least about 10 times, 20, times, 30 times, 40 times, 50 times, 60 times, 70 times, 80 times, 90 times or more, or at least about 100 times faster in a target cell or under a first reference condition (which can, e.g., be selected to mimic or represent intracellular conditions) than in the blood of a subject, or under a second reference condition (which can, e.g., be selected to mimic or represent conditions found in the blood or serum).

[0303] Cleavable linking groups are susceptible to cleavage agents, e.g., pH, redox potential or the presence of degradative molecules. Generally, cleavage agents are more prevalent or found at higher levels or activities inside cells than in serum or blood. Examples of such degradative agents include: redox agents which are selected for particular substrates or which have no substrate specificity, including, e.g., oxidative or reductive enzymes or reductive agents such as mercaptans, present in cells, that can degrade a redox cleavable linking group by reduction; esterases; endosomes or agents that can create an acidic environment, e.g., those that result in a pH of five or lower; enzymes that can hydrolyze or degrade an acid cleavable linking group by acting as a general acid, peptidases (which can be substrate specific), and phosphatases.

[0304] A cleavable linkage group, such as a disulfide bond can be susceptible to pH. The pH of human serum is 7.4, while the average intracellular pH is slightly lower, ranging from about 7.1-7.3. Endosomes have a more acidic pH, in the range of 5.5-6.0, and lysosomes have an even more acidic pH at around 5.0. Some linkers will have a cleavable linking group that is cleaved at a preferred pH, thereby releasing a cationic lipid from the ligand inside the cell, or into the desired compartment of the cell.

[0305] A linker can include a cleavable linking group that is cleavable by a particular enzyme. The type of cleavable linking group incorporated into a linker can depend on the cell to be targeted. For example, a liver-targeting ligand can be linked to a cationic lipid through a linker that includes an ester group. Liver cells are rich in esterases, and therefore the linker will be cleaved more efficiently in liver cells than in cell types that are not esterase-rich. Other cell-types rich in esterases include cells of the lung, renal cortex, and testis.

[0306] Linkers that contain peptide bonds can be used when targeting cell types rich in peptidases, such as liver cells and synoviocytes.

[0307] In general, the suitability of a candidate cleavable linking group can be evaluated by testing the ability of a degradative agent (or condition) to cleave the candidate linking group. It will also be desirable to also test the candidate cleavable linking group for the ability to resist cleavage in the blood or when in contact with other non-target tissue. Thus, one can determine the relative susceptibility to cleavage between a first and a second condition, where the first is selected to be indicative of cleavage in a target cell and the second is selected to be indicative of cleavage in other tissues or biological fluids, e.g., blood or serum. The evaluations can be carried out in cell free systems, in cells, in cell culture, in organ or tissue culture, or in whole animals. It can be useful to make initial evaluations in cell-free or culture conditions and to confirm by further evaluations in whole animals. In preferred embodiments, useful candidate compounds are cleaved at least about 2, 4, 10, 20, 30, 40, 50, 60, 70, 80, 90, or about 100 times faster in the cell (or under in vitro conditions selected to mimic intracellular conditions) as compared to blood or serum (or under in vitro conditions selected to mimic extracellular conditions).

i. Redox Cleavable Linking Groups

[0308] In one embodiment, a cleavable linking group is a redox cleavable linking group that is cleaved upon reduction or oxidation. An example of reductively cleavable linking group is a disulphide linking group (—S—S—). To determine if a candidate cleavable linking group is a suitable “reductively cleavable linking group,” or for example is suitable for use with a particular iRNA moiety and particular targeting agent one can look to methods described herein. For example, a candidate can be evaluated by incubation with dithiothreitol (DTT), or other reducing agent using reagents know in the art, which mimic the rate of cleavage which would be observed in a cell, e.g., a target cell. The candidates can also be evaluated under conditions which are selected to mimic blood or serum conditions. In one, candidate compounds are cleaved by at most about 10% in the blood. In other embodiments, useful candidate compounds are degraded at least about 2, 4, 10, 20, 30, 40, 50, 60, 70, 80, 90, or about 100 times faster in the cell (or under in vitro conditions selected to mimic intracellular conditions) as compared to blood (or under in vitro conditions selected to mimic extracellular conditions). The rate of cleavage of candidate compounds can be determined using standard enzyme kinetics assays under conditions chosen to mimic intracellular media and compared to conditions chosen to mimic extracellular media.

ii. Phosphate-Based Cleavable Linking Groups

[0309] In another embodiment, a cleavable linker comprises a phosphate-based cleavable linking group. A phosphate-based cleavable linking group is cleaved by agents that degrade or hydrolyze the phosphate group. An example of an agent that cleaves phosphate groups in cells are enzymes such as phosphatases in cells. Examples of phosphate-based linking groups are —O—P(O)(ORk)-O—, —O—P(S)(ORk)-O—, —O—P(S)(SRk)-O—, —S—P(O)(ORk)-O—, —O—P(O)(ORk)-S—, —S—P(O)(ORk)-S—, —O—P(S)(ORk)-S—, —S—P(S)(ORk)-O—, —O—P(O)(Rk)-O—, —O—P(S)(Rk)-O—, —S—P(O)(Rk)-O—, —S—P(S)(Rk)-O—, —S—P(O)(Rk)-S—, —O—P(S)(Rk)-S—. Preferred embodiments are —O—P(O)(OH)—O—, —O—P(S)(OH)—O—, —O—P(S)(SH)—O—, —S—P(O)(OH)—O—, —O—P(O)(OH)—S—, —S—P(O)(OH)—S—, —O—P(S)(OH)—S—, —S—P(S)(OH)—O—, —O—P(O)(H)—O—, —O—P(S)(H)—O—, —S—P(O)(H)—O, —S—P(S)(H)—O—, —S—P(O)(H)—S—, —O—P(S)(H)—S—. A preferred embodiment is —O—P(O)(OH)—O—. These candidates can be evaluated using methods analogous to those described above.

iii. Acid Cleavable Linking Groups

[0310] In another embodiment, a cleavable linker comprises an acid cleavable linking group. An acid cleavable linking group is a linking group that is cleaved under acidic conditions. In preferred embodiments acid cleavable linking groups are cleaved in an acidic environment with a pH of about 6.5 or lower (e.g., about 6.0, 5.75, 5.5, 5.25, 5.0, or lower), or by agents such as enzymes that can act as a general acid. In a cell, specific low pH organelles, such as endosomes and lysosomes can provide a cleaving environment for acid cleavable linking groups. Examples of acid cleavable linking groups include but are not limited to hydrazones, esters, and esters of amino acids. Acid cleavable groups can have the general formula —C═NN—, C(O)O, or —OC(O). A preferred embodiment is when the carbon attached to the oxygen of the ester (the alkoxy group) is an aryl group, substituted alkyl group, or tertiary alkyl group such as dimethyl pentyl or t-butyl. These candidates can be evaluated using methods analogous to those described above.

iv. Ester-Based Linking Groups

[0311] In another embodiment, a cleavable linker comprises an ester-based cleavable linking group. An ester-based cleavable linking group is cleaved by enzymes such as esterases and amidases in cells. Examples of ester-based cleavable linking groups include but are not limited to esters of alkylene, alkenylene and alkynylene groups. Ester cleavable linking groups have the general formula —C(O)O—, or —OC(O)—. These candidates can be evaluated using methods analogous to those described above.

v. Peptide-Based Cleaving Groups

[0312] In yet another embodiment, a cleavable linker comprises a peptide-based cleavable linking group. A peptide-based cleavable linking group is cleaved by enzymes such as peptidases and proteases in cells. Peptide-based cleavable linking groups are peptide bonds formed between amino acids to yield oligopeptides (e.g., dipeptides, tripeptides etc.) and polypeptides. Peptide-based cleavable groups do not include the amide group (—C(O)NH—). The amide group can be formed between any alkylene, alkenylene or alkynelene. A peptide bond is a special type of amide bond formed between amino acids to yield peptides and proteins. The peptide based cleavage group is generally limited to the peptide bond (i.e., the amide bond) formed between amino acids yielding peptides and proteins and does not include the entire amide functional group. Peptide-based cleavable linking groups have the general formula —NHCHRAC(O)NHCHRBC(O)—, where RA and RB are the R groups of the two adjacent amino acids. These candidates can be evaluated using methods analogous to those described above.

[0313] In one embodiment, an iRNA of the invention is conjugated to a carbohydrate through a linker. Non-limiting examples of iRNA carbohydrate conjugates with linkers of the compositions and methods of the invention include, but are not limited to,

[chemical structure]

[chemical structure]

[chemical structure]

[0314] when one of X or Y is an oligonucleotide, the other is a hydrogen.

[0315] In certain embodiments of the compositions and methods of the invention, a ligand is one or more “GalNAc” (N-acetylgalactosamine) derivatives attached through a bivalent or trivalent branched linker.

[0316] In one embodiment, a dsRNA of the invention is conjugated to a bivalent or trivalent branched linker selected from the group of structures shown in any of formula (XXXII)—(XXXV):

[chemical structure]

wherein:
[0317] q^{2A}, q^{2B}, q^{3A}, q^{3B}, q^{4A}, q^{4B}, q^{5A}, q^{5B} and q^{5C} represent independently for each occurrence 0-20 and wherein the repeating unit can be the same or different;
[0318] P^{2A}, P^{2B}, P^{3A}, P^{3B}, P^{4A}, P^{4B}, P^{5A}, P^{5B}, P^{5C}, T^{2A}, T^{2B}, T^{3A}, T^{3B}, T^{4A}, T^{4B}, T^{5A}, T^{5B}, T^{5C} are each independently for each occurrence absent, CO, NH, O, S, OC(O), NHC(O), CH₂, CH₂NH or CH₂O;
[0319] Q^{2A}, Q^{2B}, Q^{3A}, Q^{3B}, Q^{4A}, Q^{4B}, Q^{5A}, Q^{5B}, Q^{5C} are independently for each occurrence absent, alkylene, substituted alkylene wherein one or more methylenes can be interrupted or terminated by one or more of O, S, S(O), SO₂, N(R^{N}), C(R′)═C(R″), C≡C or C(O);
[0320] R^{2A}, R^{2B}, R^{3A}, R^{3B}, R^{4A}, R^{4B}, R^{5A}, R^{5B}, R^{5C} are each independently for each occurrence absent, NH, O, S, CH₂, C(O)O, C(O)NH, NHCH(R^{a})C(O), —C(O)—CH(R^{a})—NH—, CO, CH═N—O,

[chemical structure]

or heterocyclyl;
[0321] L^{2A}, L^{2B}, L^{3A}, L^{3B}, L^{4A}, L^{4B}, L^{5A}, L^{5B} and L^{5C} represent the ligand; i.e. each independently for each occurrence a monosaccharide (such as GalNAc), disaccharide, trisaccharide, tetrasaccharide, oligosaccharide, or polysaccharide; and R^{a} is H or amino acid side chain. Trivalent conjugating GalNAc derivatives are particularly useful for use with RNAi agents for inhibiting the expression of a target gene, such as those of formula (XXXV):

[chemical structure]

[0322] wherein L^{5A}, L^{5B} and L^{5C} represent a monosaccharide, such as GalNAc derivative.

[0323] Examples of suitable bivalent and trivalent branched linker groups conjugating GalNAc derivatives include, but are not limited to, the structures recited above as formulas II, VII, XI, X, and XIII.

[0324] Representative U.S. patents that teach the preparation of RNA conjugates include, but are not limited to, U.S. Pat. Nos. 4,828,979; 4,948,882; 5,218,105; 5,525,465; 5,541,313; 5,545,730; 5,552,538; 5,578,717, 5,580,731; 5,591,584; 5,109,124; 5,118,802; 5,138,045; 5,414,077; 5,486,603; 5,512,439; 5,578,718; 5,608,046; 4,587,044; 4,605,735; 4,667,025; 4,762,779; 4,789,737; 4,824,941; 4,835,263; 4,876,335; 4,904,582; 4,958,013; 5,082,830; 5,112,963; 5,214,136; 5,082,830; 5,112,963; 5,214,136; 5,245,022; 5,254,469; 5,258,506; 5,262,536; 5,272,250; 5,292,873; 5,317,098; 5,371,241, 5,391,723; 5,416,203, 5,451,463; 5,510,475; 5,512,667; 5,514,785; 5,565,552; 5,567,810; 5,574,142; 5,585,481; 5,587,371; 5,595,726; 5,597,696; 5,599,923; 5,599,928 and 5,688,941; 6,294,664; 6,320,017; 6,576,752; 6,783,931; 6,900,297; 7,037,646; 8,106,022, the entire contents of each of which are hereby incorporated herein by reference.

[0325] It is not necessary for all positions in a given compound to be uniformly modified, and in fact more than one of the aforementioned modifications can be incorporated in a single compound or even at a single nucleoside within an iRNA. The present invention also includes iRNA compounds that are chimeric compounds.

[0326] “Chimeric” iRNA compounds or “chimeras,” in the context of this invention, are iRNA compounds, preferably dsRNAs, which contain two or more chemically distinct regions, each made up of at least one monomer unit, i.e., a nucleotide in the case of a dsRNA compound. These iRNAs typically contain at least one region wherein the RNA is modified so as to confer upon the iRNA increased resistance to nuclease degradation, increased cellular uptake, and/or increased binding affinity for the target nucleic acid. An additional region of the iRNA can serve as a substrate for enzymes capable of cleaving RNA:DNA or RNA:RNA hybrids. By way of example, RNase H is a cellular endonuclease which cleaves the RNA strand of an RNA:DNA duplex. Activation of RNase H, therefore, results in cleavage of the RNA target, thereby greatly enhancing the efficiency of iRNA inhibition of gene expression. Consequently, comparable results can often be obtained with shorter iRNAs when chimeric dsRNAs are used, compared to phosphorothioate deoxy dsRNAs hybridizing to the same target region. Cleavage of the RNA target can be routinely detected by gel electrophoresis and, if necessary, associated nucleic acid hybridization techniques known in the art.

[0327] In certain instances, the RNA of an iRNA can be modified by a non-ligand group. A number of non-ligand molecules have been conjugated to iRNAs in order to enhance the activity, cellular distribution or cellular uptake of the iRNA, and procedures for performing such conjugations are available in the scientific literature. Such non-ligand moieties have included lipid moieties, such as cholesterol (Kubo, T. et al., Biochem. Biophys. Res. Comm., 2007, 365(1):54-61; Letsinger et al., Proc. Natl. Acad. Sci. USA, 1989, 86:6553), cholic acid (Manoharan et al., Bioorg. Med. Chem. Lett., 1994, 4:1053), a thioether, e.g., hexyl-S-tritylthiol (Manoharan et al., Ann. N.Y. Acad. Sci., 1992, 660:306; Manoharan et al., Bioorg. Med. Chem. Let., 1993, 3:2765), a thiocholesterol (Oberhauser et al., Nucl. Acids Res., 1992, 20:533), an aliphatic chain, e.g., dodecandiol or undecyl residues (Saison-Behmoaras et al., EMBO J., 1991, 10:111; Kabanov et al., FEBS Lett., 1990, 259:327; Svinarchuk et al., Biochimie, 1993, 75:49), a phospholipid, e.g., di-hexadecyl-rac-glycerol or triethylammonium 1,2-di-O-hexadecyl-rac-glycero-3-H-phosphonate (Manoharan et al., Tetrahedron Lett., 1995, 36:3651; Shea et al., Nucl. Acids Res., 1990, 18:3777), a polyamine or a polyethylene glycol chain (Manoharan et al., Nucleosides & Nucleotides, 1995, 14:969), or adamantane acetic acid (Manoharan et al., Tetrahedron Lett., 1995, 36:3651), a palmityl moiety (Mishra et al., Biochim. Biophys. Acta, 1995, 1264:229), or an octadecylamine or hexylamino-carbonyl-oxycholesterol moiety (Crooke et al., J. Pharmacol. Exp. Ther., 1996, 277:923). Representative United States patents that teach the preparation of such RNA conjugates have been listed above. Typical conjugation protocols involve the synthesis of an RNAs bearing an aminolinker at one or more positions of the sequence. The amino group is then reacted with the molecule being conjugated using appropriate coupling or activating reagents. The conjugation reaction can be performed either with the RNA still bound to the solid support or following cleavage of the RNA, in solution phase. Purification of the RNA conjugate by HPLC typically affords the pure conjugate.

### V. Delivery of an iRNA of the Invention

[0328] The delivery of an iRNA of the invention to a cell e.g., a cell within a subject, such as a human subject (e.g., a subject in need thereof, such as a subject having a APCS-associated disease as described herein) can be achieved in a number of different ways. For example, delivery may be performed by contacting a cell with an iRNA of the invention either in vitro or in vivo. In vivo delivery may also be performed directly by administering a composition comprising an iRNA, e.g., a dsRNA, to a subject. Alternatively, in vivo delivery may be performed indirectly by administering one or more vectors that encode and direct the expression of the iRNA. These alternatives are discussed further below.

[0329] In general, any method of delivering a nucleic acid molecule (in vitro or in vivo) can be adapted for use with an iRNA of the invention (see e.g., Akhtar S. and Julian R L. (1992) Trends Cell. Biol. 2(5):139-144 and WO94/02595, which are incorporated herein by reference in their entireties). For in vivo delivery, factors to consider in order to deliver an iRNA molecule include, for example, biological stability of the delivered molecule, prevention of non-specific effects, and accumulation of the delivered molecule in the target tissue. The non-specific effects of an iRNA can be minimized by local administration, for example, by direct injection or implantation into a tissue or topically administering the preparation. Local administration to a treatment site maximizes local concentration of the agent, limits the exposure of the agent to systemic tissues that can otherwise be harmed by the agent or that can degrade the agent, and permits a lower total dose of the iRNA molecule to be administered. Several studies have shown successful knockdown of gene products when an iRNA is administered locally. For example, intraocular delivery of a VEGF dsRNA by intravitreal injection in cynomolgus monkeys (Tolentino, M J., et al (2004) Retina 24:132-138) and subretinal injections in mice (Reich, S J., et al (2003) Mol. Vis. 9:210-216) were both shown to prevent neovascularization in an experimental model of age-related macular degeneration. In addition, direct intratumoral injection of a dsRNA in mice reduces tumor volume (Pille, J., et al (2005) Mol. Ther. 11:267-274) and can prolong survival of tumor-bearing mice (Kim, W J., et al (2006) Mol. Ther. 14:343-350; Li, S., et al (2007) Mol. Ther. 15:515-523). RNA interference has also shown success with local delivery to the CNS by direct injection (Dorn, G., et al. (2004) Nucleic Acids 32:e49; Tan, P H., et al (2005) Gene Ther. 12:59-66; Makimura, H., et al (2002) BMC Neurosci. 3:18; Shishkina, G T., et al (2004) Neuroscience 129:521-528; Thakker, E R., et al (2004) Proc. Natl. Acad. Sci. U.S.A. 101:17270-17275; Akaneya, Y., et al (2005) J. Neurophysiol. 93:594-602) and to the lungs by intranasal administration (Howard, K A., et al (2006) Mol. Ther. 14:476-484; Zhang, X., et al (2004) J. Biol. Chem. 279:10677-10684; Bitko, V., et al (2005) Nat. Med. 11:50-55). For administering an iRNA systemically for the treatment of a disease, the RNA can be modified or alternatively delivered using a drug delivery system; both methods act to prevent the rapid degradation of the dsRNA by endo- and exo-nucleases in vivo. Modification of the RNA or the pharmaceutical carrier can also permit targeting of the iRNA composition to the target tissue and avoid undesirable off-target effects. iRNA molecules can be modified by chemical conjugation to lipophilic groups such as cholesterol to enhance cellular uptake and prevent degradation. For example, an iRNA directed against ApoB conjugated to a lipophilic cholesterol moiety was injected systemically into mice and resulted in knockdown of apoB mRNA in both the liver and jejunum (Soutschek, J., et al (2004) Nature 432:173-178). Conjugation of an iRNA to an aptamer has been shown to inhibit tumor growth and mediate tumor regression in a mouse model of prostate cancer (McNamara, J O., et al (2006) Nat. Biotechnol. 24:1005-1015). In an alternative embodiment, the iRNA can be delivered using drug delivery systems such as a nanoparticle, a dendrimer, a polymer, liposomes, or a cationic delivery system. Positively charged cationic delivery systems facilitate binding of an iRNA molecule (negatively charged) and also enhance interactions at the negatively charged cell membrane to permit efficient uptake of an iRNA by the cell. Cationic lipids, dendrimers, or polymers can either be bound to an iRNA, or induced to form a vesicle or micelle (see e.g., Kim S H., et al (2008) Journal of Controlled Release 129(2):107-116) that encases an iRNA. The formation of vesicles or micelles further prevents degradation of the iRNA when administered systemically. Methods for making and administering cationic-iRNA complexes are well within the abilities of one skilled in the art (see e.g., Sorensen, D R., et al (2003) J. Mol. Biol 327:761-766; Verma, U N., et al (2003) Clin. Cancer Res. 9:1291-1300; Arnold, A S et al (2007) J. Hypertens. 25:197-205, which are incorporated herein by reference in their entirety). Some non-limiting examples of drug delivery systems useful for systemic delivery of iRNAs include DOTAP (Sorensen, D R., et al (2003), supra; Verma, U N., et al (2003), supra), Oligofectamine, “solid nucleic acid lipid particles” (Zimmermann, T S., et al (2006) Nature 441:111-114), cardiolipin (Chien, P Y., et al (2005) Cancer Gene Ther. 12:321-328; Pal, A., et al (2005) Int J. Oncol. 26:1087-1091), polyethyleneimine (Bonnet M E., et al (2008) Pharm. Res. August 16 Epub ahead of print; Aigner, A. (2006) J. Biomed. Biotechnol. 71659), Arg-Gly-Asp (RGD) peptides (Liu, S. (2006) Mol. Pharm. 3:472-487), and polyamidoamines (Tomalia, D A., et al (2007) Biochem. Soc. Trans. 35:61-67; Yoo, H., et al (1999) Pharm. Res. 16:1799-1804). In some embodiments, an iRNA forms a complex with cyclodextrin for systemic administration. Methods for administration and pharmaceutical compositions of iRNAs and cyclodextrins can be found in U.S. Pat. No. 7,427,605, which is herein incorporated by reference in its entirety.

A. Vector Encoded iRNAs of the Invention

[0330] iRNA targeting a APCS gene can be expressed from transcription units inserted into DNA or RNA vectors (see, e.g., Couture, A, et al., TIG. (1996), 12:5-10; Skillern, A., et al., International PCT Publication No. WO 00/22113, Conrad, International PCT Publication No. WO 00/22114, and Conrad, U.S. Pat. No. 6,054,299). Expression can be transient (on the order of hours to weeks) or sustained (weeks to months or longer), depending upon the specific construct used and the target tissue or cell type. These transgenes can be introduced as a linear construct, a circular plasmid, or a viral vector, which can be an integrating or non-integrating vector. The transgene can also be constructed to permit it to be inherited as an extrachromosomal plasmid (Gassmann, et al., Proc. Natl. Acad. Sci. USA (1995) 92:1292).

[0331] The individual strand or strands of an iRNA can be transcribed from a promoter on an expression vector. Where two separate strands are to be expressed to generate, for example, a dsRNA, two separate expression vectors can be co-introduced (e.g., by transfection or infection) into a target cell. Alternatively each individual strand of a dsRNA can be transcribed by promoters both of which are located on the same expression plasmid. In one embodiment, a dsRNA is expressed as inverted repeat polynucleotides joined by a linker polynucleotide sequence such that the dsRNA has a stem and loop structure.

[0332] iRNA expression vectors are generally DNA plasmids or viral vectors. Expression vectors compatible with eukaryotic cells, preferably those compatible with vertebrate cells, can be used to produce recombinant constructs for the expression of an iRNA as described herein. Eukaryotic cell expression vectors are well known in the art and are available from a number of commercial sources. Typically, such vectors are provided containing convenient restriction sites for insertion of the desired nucleic acid segment. Delivery of iRNA expressing vectors can be systemic, such as by intravenous or intramuscular administration, by administration to target cells ex-planted from the patient followed by reintroduction into the patient, or by any other means that allows for introduction into a desired target cell.

[0333] iRNA expression plasmids can be transfected into target cells as a complex with cationic lipid carriers (e.g., Oligofectamine) or non-cationic lipid-based carriers (e.g., Transit-TKO™) Multiple lipid transfections for iRNA-mediated knockdowns targeting different regions of a target RNA over a period of a week or more are also contemplated by the invention. Successful introduction of vectors into host cells can be monitored using various known methods. For example, transient transfection can be signaled with a reporter, such as a fluorescent marker, such as Green Fluorescent Protein (GFP). Stable transfection of cells ex vivo can be ensured using markers that provide the transfected cell with resistance to specific environmental factors (e.g., antibiotics and drugs), such as hygromycin B resistance.

[0334] Viral vector systems which can be utilized with the methods and compositions described herein include, but are not limited to, (a) adenovirus vectors; (b) retrovirus vectors, including but not limited to lentiviral vectors, moloney murine leukemia virus, etc.; (c) adeno-associated virus vectors; (d) herpes simplex virus vectors; (e) SV 40 vectors; (f) polyoma virus vectors; (g) papilloma virus vectors; (h) picornavirus vectors; (i) pox virus vectors such as an orthopox, e.g., vaccinia virus vectors or avipox, e.g. canary pox or fowl pox; and (j) a helper-dependent or gutless adenovirus. Replication-defective viruses can also be advantageous. Different vectors will or will not become incorporated into the cells' genome. The constructs can include viral sequences for transfection, if desired. Alternatively, the construct can be incorporated into vectors capable of episomal replication, e.g. EPV and EBV vectors. Constructs for the recombinant expression of an iRNA will generally require regulatory elements, e.g., promoters, enhancers, etc., to ensure the expression of the iRNA in target cells. Other aspects to consider for vectors and constructs are further described below.

[0335] Vectors useful for the delivery of an iRNA will include regulatory elements (promoter, enhancer, etc.) sufficient for expression of the iRNA in the desired target cell or tissue. The regulatory elements can be chosen to provide either constitutive or regulated/inducible expression.

[0336] Expression of the iRNA can be precisely regulated, for example, by using an inducible regulatory sequence that is sensitive to certain physiological regulators, e.g., circulating glucose levels, or hormones (Docherty et al., 1994, FASEB J. 8:20-24). Such inducible expression systems, suitable for the control of dsRNA expression in cells or in mammals include, for example, regulation by ecdysone, by estrogen, progesterone, tetracycline, chemical inducers of dimerization, and isopropyl-beta-D1-thiogalactopyranoside (IPTG). A person skilled in the art would be able to choose the appropriate regulatory/promoter sequence based on the intended use of the iRNA transgene.

[0337] Viral vectors that contain nucleic acid sequences encoding an iRNA can be used. For example, a retroviral vector can be used (see Miller et al., Meth. Enzymol. 217:581-599 (1993)). These retroviral vectors contain the components necessary for the correct packaging of the viral genome and integration into the host cell DNA. The nucleic acid sequences encoding an iRNA are cloned into one or more vectors, which facilitate delivery of the nucleic acid into a patient. More detail about retroviral vectors can be found, for example, in Boesen et al., Biotherapy 6:291-302 (1994), which describes the use of a retroviral vector to deliver the mdr1 gene to hematopoietic stem cells in order to make the stem cells more resistant to chemotherapy. Other references illustrating the use of retroviral vectors in gene therapy are: Clowes et al., J. Clin. Invest. 93:644-651 (1994); Kiem et al., Blood 83:1467-1473 (1994); Salmons and Gunzberg, Human Gene Therapy 4:129-141 (1993); and Grossman and Wilson, Curr. Opin. in Genetics and Devel. 3:110-114 (1993). Lentiviral vectors contemplated for use include, for example, the HIV based vectors described in U.S. Pat. Nos. 6,143,520; 5,665,557; and 5,981,276, which are herein incorporated by reference.

[0338] Adenoviruses are also contemplated for use in delivery of iRNAs of the invention. Adenoviruses are especially attractive vehicles, e.g., for delivering genes to respiratory epithelia. Adenoviruses naturally infect respiratory epithelia where they cause a mild disease. Other targets for adenovirus-based delivery systems are liver, the central nervous system, endothelial cells, and muscle. Adenoviruses have the advantage of being capable of infecting non-dividing cells. Kozarsky and Wilson, Current Opinion in Genetics and Development 3:499-503 (1993) present a review of adenovirus-based gene therapy. Bout et al., Human Gene Therapy 5:3-10 (1994) demonstrated the use of adenovirus vectors to transfer genes to the respiratory epithelia of rhesus monkeys. Other instances of the use of adenoviruses in gene therapy can be found in Rosenfeld et al., Science 252:431-434 (1991); Rosenfeld et al., Cell 68:143-155 (1992); Mastrangeli et al., J. Clin. Invest. 91:225-234 (1993); PCT Publication WO94/12649; and Wang, et al., Gene Therapy 2:775-783 (1995). A suitable AV vector for expressing an iRNA featured in the invention, a method for constructing the recombinant AV vector, and a method for delivering the vector into target cells, are described in Xia H et al. (2002), Nat. Biotech. 20: 1006-1010.

[0339] Adeno-associated virus (AAV) vectors may also be used to delivery an iRNA of the invention (Walsh et al., Proc. Soc. Exp. Biol. Med. 204:289-300 (1993); U.S. Pat. No. 5,436,146). In one embodiment, the iRNA can be expressed as two separate, complementary single-stranded RNA molecules from a recombinant AAV vector having, for example, either the U6 or H1 RNA promoters, or the cytomegalovirus (CMV) promoter. Suitable AAV vectors for expressing the dsRNA featured in the invention, methods for constructing the recombinant AV vector, and methods for delivering the vectors into target cells are described in Samulski R et al. (1987), J. Virol. 61: 3096-3101; Fisher K J et al. (1996), J. Virol, 70: 520-532; Samulski R et al. (1989), J. Virol. 63: 3822-3826; U.S. Pat. Nos. 5,252,479; 5,139,941; International Patent Application No. WO 94/13788; and International Patent Application No. WO 93/24641, the entire disclosures of which are herein incorporated by reference.

[0340] Another viral vector suitable for delivery of an iRNA of the invention is a pox virus such as a vaccinia virus, for example an attenuated vaccinia such as Modified Virus Ankara (MVA) or NYVAC, an avipox such as fowl pox or canary pox.

[0341] The tropism of viral vectors can be modified by pseudotyping the vectors with envelope proteins or other surface antigens from other viruses, or by substituting different viral capsid proteins, as appropriate. For example, lentiviral vectors can be pseudotyped with surface proteins from vesicular stomatitis virus (VSV), rabies, Ebola, Mokola, and the like. AAV vectors can be made to target different cells by engineering the vectors to express different capsid protein serotypes; see, e.g., Rabinowitz J E et al. (2002), J Virol 76:791-801, the entire disclosure of which is herein incorporated by reference.

[0342] The pharmaceutical preparation of a vector can include the vector in an acceptable diluent, or can include a slow release matrix in which the gene delivery vehicle is imbedded. Alternatively, where the complete gene delivery vector can be produced intact from recombinant cells, e.g., retroviral vectors, the pharmaceutical preparation can include one or more cells which produce the gene delivery system.

### VI. Pharmaceutical Compositions of the Invention

[0343] The present invention also includes pharmaceutical compositions and formulations which include the iRNAs of the invention. In one embodiment, provided herein are pharmaceutical compositions containing an iRNA, as described herein, and a pharmaceutically acceptable carrier. The pharmaceutical compositions containing the iRNA are useful for treating a disease or disorder associated with the expression or activity of an APCS gene, e.g. an APCS-associated disease as descried herein. Such pharmaceutical compositions are formulated based on the mode of delivery. One example is compositions that are formulated for systemic administration via parenteral delivery, e.g., by subcutaneous (SC), intramuscular (IM), or intravenous (IV) delivery. Another example is compositions that are formulated for direct delivery into the brain parenchyma, e.g., by infusion into the brain, such as by continuous pump infusion. The pharmaceutical compositions of the invention may be administered in dosages sufficient to inhibit expression of the target gene.

[0344] The pharmaceutical compositions of the present invention can be administered in a number of ways depending upon whether local or systemic treatment is desired and upon the area to be treated. Administration can be topical (e.g., by a transdermal patch), pulmonary, e.g., by inhalation or insufflation of powders or aerosols, including by nebulizer; intratracheal, intranasal, epidermal and transdermal, oral or parenteral. Parenteral administration includes intravenous, intraarterial, subcutaneous, intraperitoneal or intramuscular injection or infusion; subdermal, e.g., via an implanted device; or intracranial, e.g., by intraparenchymal, intrathecal or intraventricular, administration.

[0345] The iRNA can be delivered in a manner to target a particular tissue, such as the liver (e.g., the hepatocytes of the liver).

[0346] In some embodiments, the pharmaceutical compositions of the invention are suitable for intramuscular administration to a subject. In other embodiments, the pharmaceutical compositions of the invention are suitable for intravenous administration to a subject. In some embodiments of the invention, the pharmaceutical compositions of the invention are suitable for subcutaneous administration to a subject, e.g., using a 29 g or 30 g needle.

[0347] The pharmaceutical compositions of the invention may include an RNAi agent of the invention in an unbuffered solution, such as saline or water, or in a buffer solution, such as a buffer solution comprising acetate, citrate, prolamine, carbonate, or phosphate or any combination thereof.

[0348] In one embodiment, the pharmaceutical compositions of the invention, e.g., such as the compositions suitable for subcutaneous administration, comprise an RNAi agent of the invention in phosphate buffered saline (PBS). Suitable concentrations of PBS include, for example, 1 mM, 1.5 mM, 2 mM, 2.5 mM, 3 mM, 3.5 mM, 4 mM, 4.5 mM, 5 mM, 6.5 mM, 7 mM, 7.5 mM, 9 mM, 8.5 mM, 9 mM, 9.5 mM, or about 10 mM PBS. In one embodiment of the invention, a pharmaceutical composition of the invention comprises an RNAi agent of the invention dissolved in a solution of about 5 mM PBS (e.g., 0.64 mM NaH₂PO₄, 4.36 mM Na₂HPO₄, 85 mM NaCl). Values intermediate to the above recited ranges and values are also intended to be part of this invention. In addition, ranges of values using a combination of any of the above recited values as upper and/or lower limits are intended to be included.

[0349] The pH of the pharmaceutical compositions of the invention may be between about 5.0 to about 8.0, about 5.5 to about 8.0, about 6.0 to about 8.0, about 6.5 to about 8.0, about 7.0 to about 8.0, about 5.0 to about 7.5, about 5.5 to about 7.5, about 6.0 to about 7.5, about 6.5 to about 7.5, about 5.0 to about 7.2, about 5.25 to about 7.2, about 5.5 to about 7.2, about 5.75 to about 7.2, about 6.0 to about 7.2, about 6.5 to about 7.2, or about 6.8 to about 7.2. Ranges and values intermediate to the above recited ranges and values are also intended to be part of this invention.

[0350] The osmolality of the pharmaceutical compositions of the invention may be suitable for subcutaneous administration, such as no more than about 400 mOsm/kg, e.g., between 50 and 400 mOsm/kg, between 75 and 400 mOsm/kg, between 100 and 400 mOsm/kg, between 125 and 400 mOsm/kg, between 150 and 400 mOsm/kg, between 175 and 400 mOsm/kg, between 200 and 400 mOsm/kg, between 250 and 400 mOsm/kg, between 300 and 400 mOsm/kg, between 50 and 375 mOsm/kg, between 75 and 375 mOsm/kg, between 100 and 375 mOsm/kg, between 125 and 375 mOsm/kg, between 150 and 375 mOsm/kg, between 175 and 375 mOsm/kg, between 200 and 375 mOsm/kg, between 250 and 375 mOsm/kg, between 300 and 375 mOsm/kg, between 50 and 350 mOsm/kg, between 75 and 350 mOsm/kg, between 100 and 350 mOsm/kg, between 125 and 350 mOsm/kg, between 150 and 350 mOsm/kg, between 175 and 350 mOsm/kg, between 200 and 350 mOsm/kg, between 250 and 350 mOsm/kg, between 50 and 325 mOsm/kg, between 75 and 325 mOsm/kg, between 100 and 325 mOsm/kg, between 125 and 325 mOsm/kg, between 150 and 325 mOsm/kg, between 175 and 325 mOsm/kg, between 200 and 325 mOsm/kg, between 250 and 325 mOsm/kg, between 300 and 325 mOsm/kg, between 300 and 350 mOsm/kg, between 50 and 300 mOsm/kg, between 75 and 300 mOsm/kg, between 100 and 300 mOsm/kg, between 125 and 300 mOsm/kg, between 150 and 300 mOsm/kg, between 175 and 300 mOsm/kg, between 200 and 300 mOsm/kg, between 250 and 300, between 50 and 250 mOsm/kg, between 75 and 250 mOsm/kg, between 100 and 250 mOsm/kg, between 125 and 250 mOsm/kg, between 150 and 250 mOsm/kg, between 175 and 350 mOsm/kg, between 200 and 250 mOsm/kg, e.g., about 50, 55, 60, 65, 70, 75, 80, 85, 90, 95, 100, 105, 110, 120, 125, 130, 135, 140, 145, 150, 155, 160, 165, 170, 175, 180, 185, 190, 195, 200, 205, 210, 215, 220, 225, 230, 235, 240, 245, 250, 255, 260, 265, 270, 275, 280, 285, 295, 300, 305, 310, 320, 325, 330, 335, 340, 345, 350, 355, 360, 365, 370, 375, 380, 385, 390, 395, or about 400 mOsm/kg. Ranges and values intermediate to the above recited ranges and values are also intended to be part of this invention.

[0351] The pharmaceutical compositions of the invention comprising the RNAi agents of the invention, may be present in a vial that contains about 0.5, 0.6, 0.7, 0.8, 0.9, 1.0, 1.1, 1.2, 1.3, 1.4, 1.5, 1.6, 1.7, 1.8, 1.9, or about 2.0 mL of the pharmaceutical composition. The concentration of the RNAi agents in the pharmaceutical compositions of the invention may be about 10, 15, 20, 25, 30, 35, 40, 45, 50, 55, 60, 65, 70, 75, 80, 85, 90, 95, 100, 105, 110, 115, 130, 125, 130, 135, 140, 145, 150, 175, 180, 185, 190, 195, 200, 205, 210, 215, 230, 225, 230, 235, 240, 245, 250, 275, 280, 285, 290, 295, 300, 305, 310, 315, 330, 325, 330, 335, 340, 345, 350, 375, 380, 385, 390, 395, 400, 405, 410, 415, 430, 425, 430, 435, 440, 445, 450, 475, 480, 485, 490, 495, or about 500 mg/mL. In one embodiment, the concentration of the RNAi agents in the pharmaceutical compositions of the invention is about 100 mg/mL. Values intermediate to the above recited ranges and values are also intended to be part of this invention.

[0352] The pharmaceutical compositions of the invention may comprise a dsRNA agent of the invention in a free acid form. In other embodiments of the invention, the pharmaceutical compositions of the invention may comprise a dsRNA agent of the invention in a salt form, such as a sodium salt form. In certain embodiments, when the dsRNA agents of the invention are in the sodium salt form, sodium ions are present in the agent as counterions for substantially all of the phosphodiester and/or phosphorothiotate groups present in the agent. Agents in which substantially all of the phosphodiester and/or phosphorothioate linkages have a sodium counterion include not more than 5, 4, 3, 2, or 1 phosphodiester and/or phosphorothioate linkages without a sodium counterion. In some embodiments, when the dsRNA agents of the invention are in the sodium salt form, sodium ions are present in the agent as counterions for all of the phosphodiester and/or phosphorothiotate groups present in the agent.

[0353] Pharmaceutical compositions and formulations for topical administration can include transdermal patches, ointments, lotions, creams, gels, drops, suppositories, sprays, liquids and powders. Conventional pharmaceutical carriers, aqueous, powder, or oily bases, thickeners and the like can be necessary or desirable. Coated condoms, gloves and the like can also be useful. Suitable topical formulations include those in which the iRNAs featured in the invention are in admixture with a topical delivery agent such as lipids, liposomes, fatty acids, fatty acid esters, steroids, chelating agents and surfactants. Suitable lipids and liposomes include neutral (e.g., dioleoylphosphatidyl DOPE ethanolamine, dimyristoylphosphatidyl choline DMPC, distearolyphosphatidyl choline) negative (e.g., dimyristoylphosphatidyl glycerol DMPG), and cationic (e.g., dioleoyltetramethylaminopropyl DOTAP and dioleoylphosphatidyl ethanolamine DOTMA). iRNAs featured in the invention can be encapsulated within liposomes or can form complexes thereto, in particular to cationic liposomes. Alternatively, iRNAs can be complexed to lipids, in particular to cationic lipids. Suitable fatty acids and esters include but are not limited to arachidonic acid, oleic acid, eicosanoic acid, lauric acid, caprylic acid, capric acid, myristic acid, palmitic acid, stearic acid, linoleic acid, linolenic acid, dicaprate, tricaprate, monoolein, dilaurin, glyceryl 1-monocaprate, 1-dodecylazacycloheptan-2-one, an acylcarnitine, an acylcholine, or a C₁₋₂₀ alkyl ester (e.g., isopropylmyristate IPM), monoglyceride or diglyceride or pharmaceutically acceptable salt thereof. Topical formulations are described in detail in U.S. Pat. No. 6,747,014, which is incorporated herein by reference.

A. iRNA Formulations Comprising Membranous Molecular Assemblies

[0354] An iRNA for use in the compositions and methods of the invention can be formulated for delivery in a membranous molecular assembly, e.g., a liposome or a micelle. As used herein, the term “liposome” refers to a vesicle composed of amphiphilic lipids arranged in at least one bilayer, e.g., one bilayer or a plurality of bilayers. Liposomes include unilamellar and multilamellar vesicles that have a membrane formed from a lipophilic material and an aqueous interior. The aqueous portion contains the iRNA composition. The lipophilic material isolates the aqueous interior from an aqueous exterior, which typically does not include the iRNA composition, although in some examples, it may. Liposomes are useful for the transfer and delivery of active ingredients to the site of action. Because the liposomal membrane is structurally similar to biological membranes, when liposomes are applied to a tissue, the liposomal bilayer fuses with bilayer of the cellular membranes. As the merging of the liposome and cell progresses, the internal aqueous contents that include the iRNA are delivered into the cell where the iRNA can specifically bind to a target RNA and can mediate RNAi. In some cases the liposomes are also specifically targeted, e.g., to direct the iRNA to particular cell types.

[0355] A liposome containing an RNAi agent can be prepared by a variety of methods. In one example, the lipid component of a liposome is dissolved in a detergent so that micelles are formed with the lipid component. For example, the lipid component can be an amphipathic cationic lipid or lipid conjugate. The detergent can have a high critical micelle concentration and may be nonionic. Exemplary detergents include cholate, CHAPS, octylglucoside, deoxycholate, and lauroyl sarcosine. The RNAi agent preparation is then added to the micelles that include the lipid component. The cationic groups on the lipid interact with the RNAi agent and condense around the RNAi agent to form a liposome. After condensation, the detergent is removed, e.g., by dialysis, to yield a liposomal preparation of RNAi agent.

[0356] If necessary a carrier compound that assists in condensation can be added during the condensation reaction, e.g., by controlled addition. For example, the carrier compound can be a polymer other than a nucleic acid (e.g., spermine or spermidine). pH can also adjusted to favor condensation.

[0357] Methods for producing stable polynucleotide delivery vehicles, which incorporate a polynucleotide/cationic lipid complex as structural components of the delivery vehicle, are further described in, e.g., WO 96/37194, the entire contents of which are incorporated herein by reference. Liposome formation can also include one or more aspects of exemplary methods described in Felgner, P. L. et al., Proc. Natl. Acad. Sci., USA 8:7413-7417, 1987; U.S. Pat. Nos. 4,897,355; 5,171,678; Bangham, et al. M. Mol. Biol. 23:238, 1965; Olson, et al. Biochim. Biophys. Acta 557:9, 1979; Szoka, et al. Proc. Natl. Acad. Sci. 75: 4194, 1978; Mayhew, et al. Biochim. Biophys. Acta 775:169, 1984; Kim, et al. Biochim. Biophys. Acta 728:339, 1983; and Fukunaga, et al. Endocrinol. 115:757, 1984. Commonly used techniques for preparing lipid aggregates of appropriate size for use as delivery vehicles include sonication and freeze-thaw plus extrusion (see, e.g., Mayer, et al. Biochim. Biophys. Acta 858:161, 1986). Microfluidization can be used when consistently small (50 to 200 nm) and relatively uniform aggregates are desired (Mayhew, et al. Biochim. Biophys. Acta 775:169, 1984). These methods are readily adapted to packaging RNAi agent preparations into liposomes.

[0358] Liposomes fall into two broad classes. Cationic liposomes are positively charged liposomes which interact with the negatively charged nucleic acid molecules to form a stable complex. The positively charged nucleic acid/liposome complex binds to the negatively charged cell surface and is internalized in an endosome. Due to the acidic pH within the endosome, the liposomes are ruptured, releasing their contents into the cell cytoplasm (Wang et al., Biochem. Biophys. Res. Commun., 1987, 147, 980-985).

[0359] Liposomes which are pH-sensitive or negatively-charged, entrap nucleic acids rather than complex with it. Since both the nucleic acid and the lipid are similarly charged, repulsion rather than complex formation occurs. Nevertheless, some nucleic acid is entrapped within the aqueous interior of these liposomes. pH-sensitive liposomes have been used to deliver nucleic acids encoding the thymidine kinase gene to cell monolayers in culture. Expression of the exogenous gene was detected in the target cells (Zhou et al., Journal of Controlled Release, 1992, 19, 269-274).

[0360] One major type of liposomal composition includes phospholipids other than naturally-derived phosphatidylcholine. Neutral liposome compositions, for example, can be formed from dimyristoyl phosphatidylcholine (DMPC) or dipalmitoyl phosphatidylcholine (DPPC). Anionic liposome compositions generally are formed from dimyristoyl phosphatidylglycerol, while anionic fusogenic liposomes are formed primarily from dioleoyl phosphatidylethanolamine (DOPE). Another type of liposomal composition is formed from phosphatidylcholine (PC) such as, for example, soybean PC, and egg PC. Another type is formed from mixtures of phospholipid and/or phosphatidylcholine and/or cholesterol.

[0361] Examples of other methods to introduce liposomes into cells in vitro and in vivo include U.S. Pat. Nos. 5,283,185; 5,171,678; WO 94/00569; WO 93/24640; WO 91/16024; Felgner, J. Biol. Chem. 269:2550, 1994; Nabel, Proc. Natl. Acad. Sci. 90:11307, 1993; Nabel, Human Gene Ther. 3:649, 1992; Gershon, Biochem. 32:7143, 1993; and Strauss EMBO J. 11:417, 1992.

[0362] Non-ionic liposomal systems have also been examined to determine their utility in the delivery of drugs to the skin, in particular systems comprising non-ionic surfactant and cholesterol. Non-ionic liposomal formulations comprising Novasome™ I (glyceryl dilaurate/cholesterol/polyoxyethylene-10-stearyl ether) and Novasome™ II (glyceryl distearate/cholesterol/polyoxyethylene-10-stearyl ether) were used to deliver cyclosporin-A into the dermis of mouse skin. Results indicated that such non-ionic liposomal systems were effective in facilitating the deposition of cyclosporine A into different layers of the skin (Hu et al. S.T.P.Pharma. Sci., 1994, 4(6) 466).

[0363] Liposomes also include “sterically stabilized” liposomes, a term which, as used herein, refers to liposomes comprising one or more specialized lipids that, when incorporated into liposomes, result in enhanced circulation lifetimes relative to liposomes lacking such specialized lipids. Examples of sterically stabilized liposomes are those in which part of the vesicle-forming lipid portion of the liposome (A) comprises one or more glycolipids, such as monosialoganglioside G_{M1}, or (B) is derivatized with one or more hydrophilic polymers, such as a polyethylene glycol (PEG) moiety. While not wishing to be bound by any particular theory, it is thought in the art that, at least for sterically stabilized liposomes containing gangliosides, sphingomyelin, or PEG-derivatized lipids, the enhanced circulation half-life of these sterically stabilized liposomes derives from a reduced uptake into cells of the reticuloendothelial system (RES) (Allen et al., FEBS Letters, 1987, 223, 42; Wu et al., Cancer Research, 1993, 53, 3765).

[0364] Various liposomes comprising one or more glycolipids are known in the art. Papahadjopoulos et al. (Ann. N.Y. Acad. Sci., 1987, 507, 64) reported the ability of monosialoganglioside G_{M1}, galactocerebroside sulfate and phosphatidylinositol to improve blood half-lives of liposomes. These findings were expounded upon by Gabizon et al. (Proc. Natl. Acad. Sci. U.S.A., 1988, 85, 6949). U.S. Pat. No. 4,837,028 and WO 88/04924, both to Allen et al., disclose liposomes comprising (1) sphingomyelin and (2) the ganglioside G_{M1} or a galactocerebroside sulfate ester. U.S. Pat. No. 5,543,152 (Webb et al.) discloses liposomes comprising sphingomyelin. Liposomes comprising 1,2-sn-dimyristoylphosphatidylcholine are disclosed in WO 97/13499 (Lim et al).

[0365] In one embodiment, cationic liposomes are used. Cationic liposomes possess the advantage of being able to fuse to the cell membrane. Non-cationic liposomes, although not able to fuse as efficiently with the plasma membrane, are taken up by macrophages in vivo and can be used to deliver RNAi agents to macrophages.

[0366] Further advantages of liposomes include: liposomes obtained from natural phospholipids are biocompatible and biodegradable; liposomes can incorporate a wide range of water and lipid soluble drugs; liposomes can protect encapsulated RNAi agents in their internal compartments from metabolism and degradation (Rosoff, in “Pharmaceutical Dosage Forms,” Lieberman, Rieger and Banker (Eds.), 1988, volume 1, p. 245). Important considerations in the preparation of liposome formulations are the lipid surface charge, vesicle size and the aqueous volume of the liposomes.

[0367] A positively charged synthetic cationic lipid, N-[1-(2,3-dioleyloxy)propyl]-N,N,N-trimethylammonium chloride (DOTMA) can be used to form small liposomes that interact spontaneously with nucleic acid to form lipid-nucleic acid complexes which are capable of fusing with the negatively charged lipids of the cell membranes of tissue culture cells, resulting in delivery of RNAi agent (see, e.g., Felgner, P. L. et al., Proc. Natl. Acad. Sci., USA 8:7413-7417, 1987 and U.S. Pat. No. 4,897,355 for a description of DOTMA and its use with DNA).

[0368] A DOTMA analogue, 1,2-bis(oleoyloxy)-3-(trimethylammonia)propane (DOTAP) can be used in combination with a phospholipid to form DNA-complexing vesicles. Lipofectin™ Bethesda Research Laboratories, Gaithersburg, Md.) is an effective agent for the delivery of highly anionic nucleic acids into living tissue culture cells that comprise positively charged DOTMA liposomes which interact spontaneously with negatively charged polynucleotides to form complexes. When enough positively charged liposomes are used, the net charge on the resulting complexes is also positive. Positively charged complexes prepared in this way spontaneously attach to negatively charged cell surfaces, fuse with the plasma membrane, and efficiently deliver functional nucleic acids into, for example, tissue culture cells. Another commercially available cationic lipid, 1,2-bis(oleoyloxy)-3,3-(trimethylammonia)propane (“DOTAP”) (Boehringer Mannheim, Indianapolis, Indiana) differs from DOTMA in that the oleoyl moieties are linked by ester, rather than ether linkages.

[0369] Other reported cationic lipid compounds include those that have been conjugated to a variety of moieties including, for example, carboxyspermine which has been conjugated to one of two types of lipids and includes compounds such as 5-carboxyspermylglycine dioctaoleoylamide (“DOGS”) (Transfectam™, Promega, Madison, Wisconsin) and dipalmitoylphosphatidylethanolamine 5-carboxyspermyl-amide (“DPPES”) (see, e.g., U.S. Pat. No. 5,171,678).

[0370] Another cationic lipid conjugate includes derivatization of the lipid with cholesterol (“DC-Chol”) which has been formulated into liposomes in combination with DOPE (See, Gao, X. and Huang, L., Biochim. Biophys. Res. Commun. 179:280, 1991). Lipopolylysine, made by conjugating polylysine to DOPE, has been reported to be effective for transfection in the presence of serum (Zhou, X. et al., Biochim. Biophys. Acta 1065:8, 1991). For certain cell lines, these liposomes containing conjugated cationic lipids, are said to exhibit lower toxicity and provide more efficient transfection than the DOTMA-containing compositions. Other commercially available cationic lipid products include DMRIE and DMRIE-HP (Vical, La Jolla, California) and Lipofectamine (DOSPA) (Life Technology, Inc., Gaithersburg, Maryland). Other cationic lipids suitable for the delivery of oligonucleotides are described in WO 98/39359 and WO 96/37194.

[0371] Liposomal formulations are particularly suited for topical administration, liposomes present several advantages over other formulations. Such advantages include reduced side effects related to high systemic absorption of the administered drug, increased accumulation of the administered drug at the desired target, and the ability to administer RNAi agent into the skin. In some implementations, liposomes are used for delivering RNAi agent to epidermal cells and also to enhance the penetration of RNAi agent into dermal tissues, e.g., into skin. For example, the liposomes can be applied topically. Topical delivery of drugs formulated as liposomes to the skin has been documented (see, e.g., Weiner et al., Journal of Drug Targeting, 1992, vol. 2,405-410 and du Plessis et al., Antiviral Research, 18, 1992, 259-265; Mannino, R. J. and Fould-Fogerite, S., Biotechniques 6:682-690, 1988; Itani, T. et al. Gene 56:267-276. 1987; Nicolau, C. et al. Meth. Enz. 149:157-176, 1987; Straubinger, R. M. and Papahadjopoulos, D. Meth. Enz. 101:512-527, 1983; Wang, C. Y. and Huang, L., Proc. Natl. Acad. Sci. USA 84:7851-7855, 1987).

[0372] Non-ionic liposomal systems have also been examined to determine their utility in the delivery of drugs to the skin, in particular systems comprising non-ionic surfactant and cholesterol. Non-ionic liposomal formulations comprising Novasome I (glyceryl dilaurate/cholesterol/polyoxyethylene-10-stearyl ether) and Novasome II (glyceryl distearate/cholesterol/polyoxyethylene-10-stearyl ether) were used to deliver a drug into the dermis of mouse skin. Such formulations with RNAi agent are useful for treating a dermatological disorder.

[0373] Liposomes that include iRNA can be made highly deformable. Such deformability can enable the liposomes to penetrate through pore that are smaller than the average radius of the liposome. For example, transfersomes are a type of deformable liposomes. Transferosomes can be made by adding surface edge activators, usually surfactants, to a standard liposomal composition. Transfersomes that include RNAi agent can be delivered, for example, subcutaneously by infection in order to deliver RNAi agent to keratinocytes in the skin. In order to cross intact mammalian skin, lipid vesicles must pass through a series of fine pores, each with a diameter less than 50 nm, under the influence of a suitable transdermal gradient. In addition, due to the lipid properties, these transferosomes can be self-optimizing (adaptive to the shape of pores, e.g., in the skin), self-repairing, and can frequently reach their targets without fragmenting, and often self-loading.

[0374] Other formulations amenable to the present invention are described in PCT Publication No. WO 2008/042973.

[0375] Transfersomes are yet another type of liposomes, and are highly deformable lipid aggregates which are attractive candidates for drug delivery vehicles. Transfersomes can be described as lipid droplets which are so highly deformable that they are easily able to penetrate through pores which are smaller than the droplet. Transfersomes are adaptable to the environment in which they are used, e.g., they are self-optimizing (adaptive to the shape of pores in the skin), self-repairing, frequently reach their targets without fragmenting, and often self-loading. To make transfersomes it is possible to add surface edge-activators, usually surfactants, to a standard liposomal composition. Transfersomes have been used to deliver serum albumin to the skin. The transfersome-mediated delivery of serum albumin has been shown to be as effective as subcutaneous injection of a solution containing serum albumin.

[0376] Surfactants find wide application in formulations such as emulsions (including microemulsions) and liposomes. The most common way of classifying and ranking the properties of the many different types of surfactants, both natural and synthetic, is by the use of the hydrophile/lipophile balance (HLB). The nature of the hydrophilic group (also known as the “head”) provides the most useful means for categorizing the different surfactants used in formulations (Rieger, in “Pharmaceutical Dosage Forms”, Marcel Dekker, Inc., New York, N.Y., 1988, p. 285).

[0377] If the surfactant molecule is not ionized, it is classified as a nonionic surfactant. Nonionic surfactants find wide application in pharmaceutical and cosmetic products and are usable over a wide range of pH values. In general their HLB values range from 2 to about 18 depending on their structure. Nonionic surfactants include nonionic esters such as ethylene glycol esters, propylene glycol esters, glyceryl esters, polyglyceryl esters, sorbitan esters, sucrose esters, and ethoxylated esters. Nonionic alkanolamides and ethers such as fatty alcohol ethoxylates, propoxylated alcohols, and ethoxylated/propoxylated block polymers are also included in this class. The polyoxyethylene surfactants are the most popular members of the nonionic surfactant class.

[0378] If the surfactant molecule carries a negative charge when it is dissolved or dispersed in water, the surfactant is classified as anionic. Anionic surfactants include carboxylates such as soaps, acyl lactylates, acyl amides of amino acids, esters of sulfuric acid such as alkyl sulfates and ethoxylated alkyl sulfates, sulfonates such as alkyl benzene sulfonates, acyl isethionates, acyl taurates and sulfosuccinates, and phosphates. The most important members of the anionic surfactant class are the alkyl sulfates and the soaps.

[0379] If the surfactant molecule carries a positive charge when it is dissolved or dispersed in water, the surfactant is classified as cationic. Cationic surfactants include quaternary ammonium salts and ethoxylated amines. The quaternary ammonium salts are the most used members of this class.

[0380] If the surfactant molecule has the ability to carry either a positive or negative charge, the surfactant is classified as amphoteric. Amphoteric surfactants include acrylic acid derivatives, substituted alkylamides, N-alkylbetaines and phosphatides.

[0381] The use of surfactants in drug products, formulations and in emulsions has been reviewed (Rieger, in “Pharmaceutical Dosage Forms”, Marcel Dekker, Inc., New York, N.Y., 1988, p. 285).

[0382] The iRNA for use in the methods of the invention can also be provided as micellar formulations. “Micelles” are defined herein as a particular type of molecular assembly in which amphipathic molecules are arranged in a spherical structure such that all the hydrophobic portions of the molecules are directed inward, leaving the hydrophilic portions in contact with the surrounding aqueous phase. The converse arrangement exists if the environment is hydrophobic.

[0383] A mixed micellar formulation suitable for delivery through transdermal membranes may be prepared by mixing an aqueous solution of the siRNA composition, an alkali metal C₈ to C₂₂ alkyl sulphate, and a micelle forming compounds. Exemplary micelle forming compounds include lecithin, hyaluronic acid, pharmaceutically acceptable salts of hyaluronic acid, glycolic acid, lactic acid, chamomile extract, cucumber extract, oleic acid, linoleic acid, linolenic acid, monoolein, monooleates, monolaurates, borage oil, evening of primrose oil, menthol, trihydroxy oxo cholanyl glycine and pharmaceutically acceptable salts thereof, glycerin, polyglycerin, lysine, polylysine, triolein, polyoxyethylene ethers and analogues thereof, polidocanol alkyl ethers and analogues thereof, chenodeoxycholate, deoxycholate, and mixtures thereof. The micelle forming compounds may be added at the same time or after addition of the alkali metal alkyl sulphate. Mixed micelles will form with substantially any kind of mixing of the ingredients but vigorous mixing in order to provide smaller size micelles.

[0384] In one method a first micellar composition is prepared which contains the siRNA composition and at least the alkali metal alkyl sulphate. The first micellar composition is then mixed with at least three micelle forming compounds to form a mixed micellar composition. In another method, the micellar composition is prepared by mixing the siRNA composition, the alkali metal alkyl sulphate and at least one of the micelle forming compounds, followed by addition of the remaining micelle forming compounds, with vigorous mixing.

[0385] Phenol and/or m-cresol may be added to the mixed micellar composition to stabilize the formulation and protect against bacterial growth. Alternatively, phenol and/or m-cresol may be added with the micelle forming ingredients. An isotonic agent such as glycerin may also be added after formation of the mixed micellar composition.

[0386] For delivery of the micellar formulation as a spray, the formulation can be put into an aerosol dispenser and the dispenser is charged with a propellant. The propellant, which is under pressure, is in liquid form in the dispenser. The ratios of the ingredients are adjusted so that the aqueous and propellant phases become one, i.e., there is one phase. If there are two phases, it is necessary to shake the dispenser prior to dispensing a portion of the contents, e.g., through a metered valve. The dispensed dose of pharmaceutical agent is propelled from the metered valve in a fine spray.

[0387] Propellants may include hydrogen-containing chlorofluorocarbons, hydrogen-containing fluorocarbons, dimethyl ether and diethyl ether. In certain embodiments, HFA 134a (1,1,1,2 tetrafluoroethane) may be used.

[0388] The specific concentrations of the essential ingredients can be determined by relatively straightforward experimentation. For absorption through the oral cavities, it is often desirable to increase, e.g., at least double or triple, the dosage for through injection or administration through the gastrointestinal tract.

### B. Lipid Particles

[0389] iRNAs, e.g., dsRNAs of in the invention may be fully encapsulated in a lipid formulation, e.g., a LNP, or other nucleic acid-lipid particle.

[0390] As used herein, the term “LNP” refers to a stable nucleic acid-lipid particle. LNPs typically contain a cationic lipid, a non-cationic lipid, and a lipid that prevents aggregation of the particle (e.g., a PEG-lipid conjugate). LNPs are extremely useful for systemic applications, as they exhibit extended circulation lifetimes following intravenous (i.v.) injection and accumulate at distal sites (e.g., sites physically separated from the administration site). LNPs include “pSPLP,” which include an encapsulated condensing agent-nucleic acid complex as set forth in PCT Publication No. WO 00/03683. The particles of the present invention typically have a mean diameter of about 50 nm to about 150 nm, more typically about 60 nm to about 130 nm, more typically about 70 nm to about 110 nm, most typically about 70 nm to about 90 nm, and are substantially nontoxic. In addition, the nucleic acids when present in the nucleic acid-lipid particles of the present invention are resistant in aqueous solution to degradation with a nuclease. Nucleic acid-lipid particles and their method of preparation are disclosed in, e.g., U.S. Pat. Nos. 5,976,567; 5,981,501; 6,534,484; 6,586,410; 6,815,432; U.S. Publication No. 2010/0324120 and PCT Publication No. WO 96/40964.

[0391] In one embodiment, the lipid to drug ratio (mass/mass ratio) (e.g., lipid to dsRNA ratio) will be in the range of from about 1:1 to about 50:1, from about 1:1 to about 25:1, from about 3:1 to about 15:1, from about 4:1 to about 10:1, from about 5:1 to about 9:1, or about 6:1 to about 9:1. Ranges intermediate to the above recited ranges are also contemplated to be part of the invention.

[0392] The cationic lipid can be, for example, N,N-dioleyl-N,N-dimethylammonium chloride (DODAC), N,N-distearyl-N,N-dimethylammonium bromide (DDAB), N—(I-(2,3-dioleoyloxy)propyl)-N,N,N-trimethylammonium chloride (DOTAP), N—(I-(2,3-dioleyloxy)propyl)-N,N,N-trimethylammonium chloride (DOTMA), N,N-dimethyl-2,3-dioleyloxy)propylamine (DODMA), 1,2-DiLinoleyloxy-N,N-dimethylaminopropane (DLinDMA), 1,2-Dilinolenyloxy-N,N-dimethylaminopropane (DLenDMA), 1,2-Dilinoleylcarbamoyloxy-3-dimethylaminopropane (DLin-C-DAP), 1,2-Dilinoleyoxy-3-(dimethylamino)acetoxypropane (DLin-DAC), 1,2-Dilinoleyoxy-3-morpholinopropane (DLin-MA), 1,2-Dilinoleoyl-3-dimethylaminopropane (DLinDAP), 1,2-Dilinoleylthio-3-dimethylaminopropane (DLin-S-DMA), 1-Linoleoyl-2-linoleyloxy-3-dimethylaminopropane (DLin-2-DMAP), 1,2-Dilinoleyloxy-3-trimethylaminopropane chloride salt (DLin-TMA.Cl), 1,2-Dilinoleoyl-3-trimethylaminopropane chloride salt (DLin-TAP.Cl), 1,2-Dilinoleyloxy-3-(N-methylpiperazino)propane (DLin-MPZ), or 3-(N,N-Dilinoleylamino)-1,2-propanediol (DLinAP), 3-(N,N-Dioleylamino)-1,2-propanedio (DOAP), 1,2-Dilinoleyloxo-3-(2-N,N-dimethylamino)ethoxypropane (DLin-EG-DMA), 1,2-Dilinolenyloxy-N,N-dimethylaminopropane (DLinDMA), 2,2-Dilinoleyl-4-dimethylaminomethyl-[1,3]-dioxolane (DLin-K-DMA) or analogs thereof, (3aR,5s,6aS)—N,N-dimethyl-2,2-di((9Z,12Z)-octadeca-9,12-dienyl)tetrahydro-3aH-cyclopenta[d][1,3]dioxol-5-amine (ALN100), (6Z,9Z,28Z,31Z)-heptatriaconta-6,9,28,31-tetraen-19-yl 4-(dimethylamino)butanoate (MC3), 1,1′-(2-(4-(2-((2-(bis(2-hydroxydodecyl)amino)ethyl)(2-hydroxydodecyl)amino)ethyl)piperazin-1-yl)ethylazanediyl)didodecan-2-ol (Tech G1), or a mixture thereof. The cationic lipid can comprise from about 20 mol % to about 50 mol % or about 40 mol % of the total lipid present in the particle.

[0393] In another embodiment, the compound 2,2-Dilinoleyl-4-dimethylaminoethyl-[1,3]-dioxolane can be used to prepare lipid-siRNA nanoparticles. Synthesis of 2,2-Dilinoleyl-4-dimethylaminoethyl-[1,3]-dioxolane is described in U.S. provisional patent application No. 61/107,998 filed on Oct. 23, 2008, which is herein incorporated by reference.

[0394] In one embodiment, the lipid-siRNA particle includes 40% 2, 2-Dilinoleyl-4-dimethylaminoethyl-[1,3]-dioxolane: 10% DSPC: 40% Cholesterol: 10% PEG-C-DOMG (mole percent) with a particle size of 63.0±20 nm and a 0.027 siRNA/Lipid Ratio.

[0395] The ionizable/non-cationic lipid can be an anionic lipid or a neutral lipid including, but not limited to, distearoylphosphatidylcholine (DSPC), dioleoylphosphatidylcholine (DOPC), dipalmitoylphosphatidylcholine (DPPC), dioleoylphosphatidylglycerol (DOPG), dipalmitoylphosphatidylglycerol (DPPG), dioleoyl-phosphatidylethanolamine (DOPE), palmitoyloleoylphosphatidylcholine (POPC), palmitoyloleoylphosphatidylethanolamine (POPE), dioleoyl-phosphatidylethanolamine 4-(N-maleimidomethyl)-cyclohexane-1-carboxylate (DOPE-mal), dipalmitoyl phosphatidyl ethanolamine (DPPE), dimyristoylphosphoethanolamine (DMPE), distearoyl-phosphatidyl-ethanolamine (DSPE), 16-O-monomethyl PE, 16-O-dimethyl PE, 18-1-trans PE, 1-stearoyl-2-oleoyl-phosphatidyethanolamine (SOPE), cholesterol, or a mixture thereof. The non-cationic lipid can be from about 5 mol % to about 90 mol %, about 10 mol %, or about 58 mol % if cholesterol is included, of the total lipid present in the particle.

[0396] The conjugated lipid that inhibits aggregation of particles can be, for example, a polyethyleneglycol (PEG)-lipid including, without limitation, a PEG-diacylglycerol (DAG), a PEG-dialkyloxypropyl (DAA), a PEG-phospholipid, a PEG-ceramide (Cer), or a mixture thereof. The PEG-DAA conjugate can be, for example, a PEG-dilauryloxypropyl (Ci₂), a PEG-dimyristyloxypropyl (Ci₄), a PEG-dipalmityloxypropyl (Ci₆), or a PEG-distearyloxypropyl (C]₈). The conjugated lipid that prevents aggregation of particles can be from 0 mol % to about 20 mol % or about 2 mol % of the total lipid present in the particle.

[0397] In some embodiments, the nucleic acid-lipid particle further includes cholesterol at, e.g., about 10 mol % to about 60 mol % or about 48 mol % of the total lipid present in the particle.

[0398] In one embodiment, the lipidoid ND98⋅4HCl (MW 1487) (see U.S. patent application Ser. No. 12/056,230, filed Mar. 26, 2008, which is incorporated herein by reference), Cholesterol (Sigma-Aldrich), and PEG-Ceramide C16 (Avanti Polar Lipids) can be used to prepare lipid-dsRNA nanoparticles (i.e., LNP01 particles). Stock solutions of each in ethanol can be prepared as follows: ND98, 133 mg/ml; Cholesterol, 25 mg/ml, PEG-Ceramide C16, 100 mg/ml. The ND98, Cholesterol, and PEG-Ceramide C16 stock solutions can then be combined in a, e.g., 42:48:10 molar ratio. The combined lipid solution can be mixed with aqueous dsRNA (e.g., in sodium acetate pH 5) such that the final ethanol concentration is about 35-45% and the final sodium acetate concentration is about 100-300 mM. Lipid-dsRNA nanoparticles typically form spontaneously upon mixing. Depending on the desired particle size distribution, the resultant nanoparticle mixture can be extruded through a polycarbonate membrane (e.g., 100 nm cut-off) using, for example, a thermobarrel extruder, such as Lipex Extruder (Northern Lipids, Inc). In some cases, the extrusion step can be omitted. Ethanol removal and simultaneous buffer exchange can be accomplished by, for example, dialysis or tangential flow filtration. Buffer can be exchanged with, for example, phosphate buffered saline (PBS) at about pH 7, e.g., about pH 6.9, about pH 7.0, about pH 7.1, about pH 7.2, about pH 7.3, or about pH 7.4.

[chemical structure]

[0399] LNP01 formulations are described, e.g., in International Application Publication No. WO 2008/042973, which is hereby incorporated by reference.

[0400] Additional exemplary lipid-dsRNA formulations are described in Table 1.

TABLE 1

| | | cationic lipid/non-cationic |
|---|---|---|
| | | lipid/cholesterol/PEG conjugate |
| | Ionizable/Cationic Lipid | Lipid:siRNA ratio |
| SNALP-1 | 1,2-Dilinolenyloxy-N,N-dimethylaminopropane | DLinDMA/DPPC/Cholesterol/PEG-cDMA |
| | (DLinDMA) | (57.1/7.1/34.4/1.4) |
| | | lipid:siRNA~7:l |
| 2-XTC | 2,2-Dilinoleyl-4-dimethylaminoethyl-[1,3]-diox [symbol] | XTC/DPPC/Cholesterol/PEG-cDMA |
| | (XTC) | 57.1/7.1/34.4/1.4 |
| | | lipid:siRNA~7:1 |
| LNP05 | 2,2-Dilinoleyl-4-dimethylaminoethyl-[1,3]-diox [symbol] | XTC/DSPC/Cholesterol/PEG-DMG |
| | (XTC) | 57.5/7.5/31.5/3.5 |
| | | lipid:siRNA~6:1 |
| LNP06 | 2,2-Dilinoleyl-4-dimethylaminoethyl-[1,3]-diox [symbol] | XTC/DSPC/Cholesterol/PEG-DMG |
| | (XTC) | 57.5/7.5/31.5/3.5 |
| | | lipid:siRNA~11:1 |
| LNP07 | 2,2-Dilinoleyl-4-dimethylaminoethyl-[1,3]-diox [symbol] | XTC/DSPC/Cholesterol/PEG-DMG |
| | (XTC) | 60/7.5/31/1.5, |
| | | lipid:siRNA~6:1 |
| LNP08 | 2,2-Dilinoleyl-4-dimethylaminoethyl-[1,3]-diox [symbol] | XTC/DSPC/Cholesterol/PEG-DMG |
| | (XTC) | 60/7.5/31/1.5, |
| | | lipid:siRNA~11:1 |
| LNP09 | 2,2-Dilinoleyl-4-dimethylaminoethyl-[1,3]-diox [symbol] | XTC/DSPC/Cholesterol/PEG-DMG |
| | (XTC) | 50/10/38.5/1.5 |
| | | Lipid:siRNA 10:1 |
| LNP10 | (3aR,5s,6aS)-N,N-dimethyl-2,2-di((9Z,12Z)-oc [symbol] | ALN100/DSPC/Cholesterol/PEG-DMG |
| | 9,12-dienyl)tetrahydro-3aH-cyclopenta[d][1,3]d [symbol] | 50/10/38.5/1.5 |
| | amine (ALN100) | Lipid:siRNA 10:1 |
| LNP11 | (6Z,9Z,28Z,31Z)-heptatriaconta-6,9,28,31-tetra [symbol] | MC-3/DSPC/Cholesterol/PEG-DMG |
| | 4-(dimethylamino)butanoate (MC3) | 50/10/38.5/1.5 |
| | | Lipid:siRNA 10:1 |
| LNP12 | 1,1′-(2-(4-(2-((2-(bis(2-hydroxydodecyl)amino) | Tech G1/DSPC/Cholesterol/PEG-DMG |
| | hydroxydodecyl)amino)ethyl)piperazin-1- | 50/10/38.5/1.5 |
| | yl)ethylazanediyl)didodecan-2-ol (Tech G1) | Lipid:siRNA 10:1 |
| LNP13 | XTC | XTC/DSPC/Chol/PEG-DMG |
| | | 50/10/38.5/1.5 |
| | | Lipid:siRNA: 33:1 |
| LNP14 | MC3 | MC3/DSPC/Chol/PEG-DMG |
| | | 40/15/40/5 |
| | | Lipid:siRNA: 11:1 |
| LNP15 | MC3 | MC3/DSPC/Chol/PEG-DSG/GalNAc-PEG-DSG |
| | | 50/10/35/4.5/0.5 |
| | | Lipid:siRNA: 11:1 |
| LNP16 | MC3 | MC3/DSPC/Chol/PEG-DMG |
| | | 50/10/38.5/1.5 |
| | | Lipid:siRNA: 7:1 |
| LNP17 | MC3 | MC3/DSPC/Chol/PEG-DSG |
| | | 50/10/38.5/1.5 |
| | | Lipid:siRNA: 10:1 |
| LNP18 | MC3 | MC3/DSPC/Chol/PEG-DMG |
| | | 50/10/38.5/1.5 |
| | | Lipid:siRNA: 12:1 |
| LNP19 | MC3 | MC3/DSPC/Chol/PEG-DMG |
| | | 50/10/35/5 |
| | | Lipid:siRNA: 8:1 |
| LNP20 | MC3 | MC3/DSPC/Chol/PEG-DPG |
| | | 50/10/38.5/1.5 |
| | | Lipid:siRNA: 10:1 |
| LNP21 | C12-200 | C12-200/DSPC/Chol/PEG-DSG |
| | | 50/10/38.5/1.5 |
| | | Lipid:siRNA: 7:1 |
| LNP22 | XTC | XTC/DSPC/Chol/PEG-DSG |
| | | 50/10/38.5/1.5 |
| | | Lipid:siRNA: 10:1 |

DSPC: distearoylphosphatidylcholine
DPPC: dipalmitoylphosphatidylcholine
PEG-DMG: PEG-didimyristoyl glycerol (C14-PEG, or PEG-C14) (PEG with avg mol wt of 2000);
PEG-DSG: PEG-distyryl glycerol (C18-PEG, or PEG-C18) (PEG with avg mol wt of 2000);
PEG-cDMA: PEG-carbamoyl-1,2-dimyristyloxypropylamine (PEG with avg mol wt of 2000);
SNALP (1,2-Dilinolenyloxy-N,N-dimethylaminopropane (DLinDMA)) comprising formulations are described in International Publication No. WO2009/127060, filed Apr. 15, 2009, which is hereby incorporated by reference.
XTC comprising formulations are described in PCT Publication No. WO 2010/088537, the entire contents of which are hereby incorporated herein by reference.
MC3 comprising formulations are described, e.g., in U.S. Publication No. 2010/0324120, filed Jun. 10, 2010, the entire contents of which are hereby incorporated by reference.
ALNY-100 comprising formulations are described in PCT Publication No. WO 2010/054406, the entire contents of which are hereby incorporated herein by reference.
C12-200 comprising formulations are described in PCT Publication No. WO 2010/129709, the entire contents of which are hereby incorporated herein by reference. [symbol]
indicates data missing or illegible when filed

[0401] Compositions and formulations for oral administration include powders or granules, microparticulates, nanoparticulates, suspensions or solutions in water or non-aqueous media, capsules, gel capsules, sachets, tablets or minitablets. Thickeners, flavoring agents, diluents, emulsifiers, dispersing aids or binders can be desirable. In some embodiments, oral formulations are those in which dsRNAs featured in the invention are administered in conjunction with one or more penetration enhancer surfactants and chelators. Suitable surfactants include fatty acids and/or esters or salts thereof, bile acids and/or salts thereof. Suitable bile acids/salts include chenodeoxycholic acid (CDCA) and ursodeoxychenodeoxycholic acid (UDCA), cholic acid, dehydrocholic acid, deoxycholic acid, glucholic acid, glycholic acid, glycodeoxycholic acid, taurocholic acid, taurodeoxycholic acid, sodium tauro-24,25-dihydro-fusidate and sodium glycodihydrofusidate. Suitable fatty acids include arachidonic acid, undecanoic acid, oleic acid, lauric acid, caprylic acid, capric acid, myristic acid, palmitic acid, stearic acid, linoleic acid, linolenic acid, dicaprate, tricaprate, monoolein, dilaurin, glyceryl 1-monocaprate, 1-dodecylazacycloheptan-2-one, an acylcarnitine, an acylcholine, or a monoglyceride, a diglyceride or a pharmaceutically acceptable salt thereof (e.g., sodium). In some embodiments, combinations of penetration enhancers are used, for example, fatty acids/salts in combination with bile acids/salts. One exemplary combination is the sodium salt of lauric acid, capric acid and UDCA. Further penetration enhancers include polyoxyethylene-9-lauryl ether, polyoxyethylene-20-cetyl ether. RNAi agents featured in the invention can be delivered orally, in granular form including sprayed dried particles, or complexed to form micro or nanoparticles. RNAi complexing agents include poly-amino acids; polyimines; polyacrylates; polyalkylacrylates, polyoxethanes, polyalkylcyanoacrylates; cationized gelatins, albumins, starches, acrylates, polyethyleneglycols (PEG) and starches; polyalkylcyanoacrylates; DEAE-derivatized polyimines, pollulans, celluloses and starches. Suitable complexing agents include chitosan, N-trimethylchitosan, poly-L-lysine, polyhistidine, polyornithine, polyspermines, protamine, polyvinylpyridine, polythiodiethylaminomethylethylene P(TDAE), polyaminostyrene (e.g., p-amino), poly(methylcyanoacrylate), poly(ethylcyanoacrylate), poly(butylcyanoacrylate), poly(isobutylcyanoacrylate), poly(isohexylcynaoacrylate), DEAE-methacrylate, DEAE-hexylacrylate, DEAE-acrylamide, DEAE-albumin and DEAE-dextran, polymethylacrylate, polyhexylacrylate, poly(D,L-lactic acid), poly(DL-lactic-co-glycolic acid (PLGA), alginate, and polyethyleneglycol (PEG). Oral formulations for dsRNAs and their preparation are described in detail in U.S. Pat. No. 6,887,906, US Publn. No. 20030027780, and U.S. Pat. No. 6,747,014, each of which is incorporated herein by reference.

[0402] Compositions and formulations for parenteral, intraparenchymal (into the brain), intrathecal, intraventricular or intrahepatic administration can include sterile aqueous solutions which can also contain buffers, diluents and other suitable additives such as, but not limited to, penetration enhancers, carrier compounds and other pharmaceutically acceptable carriers or excipients.

[0403] Pharmaceutical compositions of the present invention include, but are not limited to, solutions, emulsions, and liposome-containing formulations. These compositions can be generated from a variety of components that include, but are not limited to, preformed liquids, self-emulsifying solids and self-emulsifying semisolids. Particularly preferred are formulations that target the liver when treating hepatic disorders such as hepatic carcinoma.

[0404] The pharmaceutical formulations of the present invention, which can conveniently be presented in unit dosage form, can be prepared according to conventional techniques well known in the pharmaceutical industry. Such techniques include the step of bringing into association the active ingredients with the pharmaceutical carrier(s) or excipient(s). In general, the formulations are prepared by uniformly and intimately bringing into association the active ingredients with liquid carriers or finely divided solid carriers or both, and then, if necessary, shaping the product.

[0405] The compositions of the present invention can be formulated into any of many possible dosage forms such as, but not limited to, tablets, capsules, gel capsules, liquid syrups, soft gels, suppositories, and enemas. The compositions of the present invention can also be formulated as suspensions in aqueous, non-aqueous or mixed media. Aqueous suspensions can further contain substances which increase the viscosity of the suspension including, for example, sodium carboxymethylcellulose, sorbitol and/or dextran. The suspension can also contain stabilizers.

### C. Additional Formulations

i. Emulsions

[0406] The compositions of the present invention can be prepared and formulated as emulsions. Emulsions are typically heterogeneous systems of one liquid dispersed in another in the form of droplets usually exceeding 0.1 μm in diameter (see e.g., Ansel's Pharmaceutical Dosage Forms and Drug Delivery Systems, Allen, L V., Popovich N G., and Ansel H C., 2004, Lippincott Williams & Wilkins (8th ed.), New York, NY; Idson, in Pharmaceutical Dosage Forms, Lieberman, Rieger and Banker (Eds.), 1988, Marcel Dekker, Inc., New York, N.Y., volume 1, p. 199; Rosoff, in Pharmaceutical Dosage Forms, Lieberman, Rieger and Banker (Eds.), 1988, Marcel Dekker, Inc., New York, N.Y., Volume 1, p. 245; Block in Pharmaceutical Dosage Forms, Lieberman, Rieger and Banker (Eds.), 1988, Marcel Dekker, Inc., New York, N.Y., volume 2, p. 335; Higuchi et al., in Remington's Pharmaceutical Sciences, Mack Publishing Co., Easton, Pa., 1985, p. 301). Emulsions are often biphasic systems comprising two immiscible liquid phases intimately mixed and dispersed with each other. In general, emulsions can be of either the water-in-oil (w/o) or the oil-in-water (o/w) variety. When an aqueous phase is finely divided into and dispersed as minute droplets into a bulk oily phase, the resulting composition is called a water-in-oil (w/o) emulsion. Alternatively, when an oily phase is finely divided into and dispersed as minute droplets into a bulk aqueous phase, the resulting composition is called an oil-in-water (o/w) emulsion. Emulsions can contain additional components in addition to the dispersed phases, and the active drug which can be present as a solution in either the aqueous phase, oily phase or itself as a separate phase. Pharmaceutical excipients such as emulsifiers, stabilizers, dyes, and anti-oxidants can also be present in emulsions as needed. Pharmaceutical emulsions can also be multiple emulsions that are comprised of more than two phases such as, for example, in the case of oil-in-water-in-oil (o/w/o) and water-in-oil-in-water (w/o/w) emulsions. Such complex formulations often provide certain advantages that simple binary emulsions do not. Multiple emulsions in which individual oil droplets of an o/w emulsion enclose small water droplets constitute a w/o/w emulsion. Likewise, a system of oil droplets enclosed in globules of water stabilized in an oily continuous phase provides an o/w/o emulsion.

[0407] Emulsions are characterized by little or no thermodynamic stability. Often, the dispersed or discontinuous phase of the emulsion is well dispersed into the external or continuous phase and maintained in this form through the means of emulsifiers or the viscosity of the formulation. Either of the phases of the emulsion can be a semisolid or a solid, as is the case of emulsion-style ointment bases and creams. Other means of stabilizing emulsions entail the use of emulsifiers that can be incorporated into either phase of the emulsion. Emulsifiers can broadly be classified into four categories: synthetic surfactants, naturally occurring emulsifiers, absorption bases, and finely dispersed solids (see e.g., Ansel's Pharmaceutical Dosage Forms and Drug Delivery Systems, Allen, L V., Popovich N G., and Ansel H C., 2004, Lippincott Williams & Wilkins (8th ed.), New York, NY; Idson, in Pharmaceutical Dosage Forms, Lieberman, Rieger and Banker (Eds.), 1988, Marcel Dekker, Inc., New York, N.Y., volume 1, p. 199).

[0408] Synthetic surfactants, also known as surface active agents, have found wide applicability in the formulation of emulsions and have been reviewed in the literature (see e.g., Ansel's Pharmaceutical Dosage Forms and Drug Delivery Systems, Allen, L V., Popovich N G., and Ansel H C., 2004, Lippincott Williams & Wilkins (8th ed.), New York, NY; Rieger, in Pharmaceutical Dosage Forms, Lieberman, Rieger and Banker (Eds.), 1988, Marcel Dekker, Inc., New York, N.Y., volume 1, p. 285; Idson, in Pharmaceutical Dosage Forms, Lieberman, Rieger and Banker (Eds.), Marcel Dekker, Inc., New York, N.Y., 1988, volume 1, p. 199). Surfactants are typically amphiphilic and comprise a hydrophilic and a hydrophobic portion. The ratio of the hydrophilic to the hydrophobic nature of the surfactant has been termed the hydrophile/lipophile balance (HLB) and is a valuable tool in categorizing and selecting surfactants in the preparation of formulations. Surfactants can be classified into different classes based on the nature of the hydrophilic group: nonionic, anionic, cationic and amphoteric (see e.g., Ansel's Pharmaceutical Dosage Forms and Drug Delivery Systems, Allen, L V., Popovich N G., and Ansel H C., 2004, Lippincott Williams & Wilkins (8th ed.), New York, NY Rieger, in Pharmaceutical Dosage Forms, Lieberman, Rieger and Banker (Eds.), 1988, Marcel Dekker, Inc., New York, N.Y., volume 1, p. 285).

[0409] Naturally occurring emulsifiers used in emulsion formulations include lanolin, beeswax, phosphatides, lecithin and acacia. Absorption bases possess hydrophilic properties such that they can soak up water to form w/o emulsions yet retain their semisolid consistencies, such as anhydrous lanolin and hydrophilic petrolatum. Finely divided solids have also been used as good emulsifiers especially in combination with surfactants and in viscous preparations. These include polar inorganic solids, such as heavy metal hydroxides, nonswelling clays such as bentonite, attapulgite, hectorite, kaolin, montmorillonite, colloidal aluminum silicate and colloidal magnesium aluminum silicate, pigments and nonpolar solids such as carbon or glyceryl tristearate.

[0410] A large variety of non-emulsifying materials are also included in emulsion formulations and contribute to the properties of emulsions. These include fats, oils, waxes, fatty acids, fatty alcohols, fatty esters, humectants, hydrophilic colloids, preservatives and antioxidants (Block, in Pharmaceutical Dosage Forms, Lieberman, Rieger and Banker (Eds.), 1988, Marcel Dekker, Inc., New York, N.Y., volume 1, p. 335; Idson, in Pharmaceutical Dosage Forms, Lieberman, Rieger and Banker (Eds.), 1988, Marcel Dekker, Inc., New York, N.Y., volume 1, p. 199).

[0411] Hydrophilic colloids or hydrocolloids include naturally occurring gums and synthetic polymers such as polysaccharides (for example, acacia, agar, alginic acid, carrageenan, guar gum, karaya gum, and tragacanth), cellulose derivatives (for example, carboxymethylcellulose and carboxypropylcellulose), and synthetic polymers (for example, carbomers, cellulose ethers, and carboxyvinyl polymers). These disperse or swell in water to form colloidal solutions that stabilize emulsions by forming strong interfacial films around the dispersed-phase droplets and by increasing the viscosity of the external phase.

[0412] Since emulsions often contain a number of ingredients such as carbohydrates, proteins, sterols and phosphatides that can readily support the growth of microbes, these formulations often incorporate preservatives. Commonly used preservatives included in emulsion formulations include methyl paraben, propyl paraben, quaternary ammonium salts, benzalkonium chloride, esters of p-hydroxybenzoic acid, and boric acid. Antioxidants are also commonly added to emulsion formulations to prevent deterioration of the formulation. Antioxidants used can be free radical scavengers such as tocopherols, alkyl gallates, butylated hydroxyanisole, butylated hydroxytoluene, or reducing agents such as ascorbic acid and sodium metabisulfite, and antioxidant synergists such as citric acid, tartaric acid, and lecithin.

[0413] The application of emulsion formulations via dermatological, oral and parenteral routes and methods for their manufacture have been reviewed in the literature (see e.g., Ansel's Pharmaceutical Dosage Forms and Drug Delivery Systems, Allen, L V., Popovich N G., and Ansel H C., 2004, Lippincott Williams & Wilkins (8th ed.), New York, NY; Idson, in Pharmaceutical Dosage Forms, Lieberman, Rieger and Banker (Eds.), 1988, Marcel Dekker, Inc., New York, N.Y., volume 1, p. 199). Emulsion formulations for oral delivery have been very widely used because of ease of formulation, as well as efficacy from an absorption and bioavailability standpoint (see e.g., Ansel's Pharmaceutical Dosage Forms and Drug Delivery Systems, Allen, L V., Popovich N G., and Ansel H C., 2004, Lippincott Williams & Wilkins (8th ed.), New York, NY; Rosoff, in Pharmaceutical Dosage Forms, Lieberman, Rieger and Banker (Eds.), 1988, Marcel Dekker, Inc., New York, N.Y., volume 1, p. 245; Idson, in Pharmaceutical Dosage Forms, Lieberman, Rieger and Banker (Eds.), 1988, Marcel Dekker, Inc., New York, N.Y., volume 1, p. 199). Mineral-oil base laxatives, oil-soluble vitamins and high fat nutritive preparations are among the materials that have commonly been administered orally as o/w emulsions.

ii. Microemulsions

[0414] In one embodiment of the present invention, the compositions of iRNAs and nucleic acids are formulated as microemulsions. A microemulsion can be defined as a system of water, oil and amphiphile which is a single optically isotropic and thermodynamically stable liquid solution (see e.g., Ansel's Pharmaceutical Dosage Forms and Drug Delivery Systems, Allen, L V., Popovich N G., and Ansel H C., 2004, Lippincott Williams & Wilkins (8th ed.), New York, NY; Rosoff, in Pharmaceutical Dosage Forms, Lieberman, Rieger and Banker (Eds.), 1988, Marcel Dekker, Inc., New York, N.Y., volume 1, p. 245). Typically microemulsions are systems that are prepared by first dispersing an oil in an aqueous surfactant solution and then adding a sufficient amount of a fourth component, generally an intermediate chain-length alcohol to form a transparent system. Therefore, microemulsions have also been described as thermodynamically stable, isotropically clear dispersions of two immiscible liquids that are stabilized by interfacial films of surface-active molecules (Leung and Shah, in: Controlled Release of Drugs: Polymers and Aggregate Systems, Rosoff, M., Ed., 1989, VCH Publishers, New York, pages 185-215). Microemulsions commonly are prepared via a combination of three to five components that include oil, water, surfactant, cosurfactant and electrolyte. Whether the microemulsion is of the water-in-oil (w/o) or an oil-in-water (o/w) type is dependent on the properties of the oil and surfactant used and on the structure and geometric packing of the polar heads and hydrocarbon tails of the surfactant molecules (Schott, in Remington's Pharmaceutical Sciences, Mack Publishing Co., Easton, Pa., 1985, p. 271).

[0415] The phenomenological approach utilizing phase diagrams has been extensively studied and has yielded a comprehensive knowledge, to one skilled in the art, of how to formulate microemulsions (see e.g., Ansel's Pharmaceutical Dosage Forms and Drug Delivery Systems, Allen, L V., Popovich N G., and Ansel H C., 2004, Lippincott Williams & Wilkins (8th ed.), New York, NY; Rosoff, in Pharmaceutical Dosage Forms, Lieberman, Rieger and Banker (Eds.), 1988, Marcel Dekker, Inc., New York, N.Y., volume 1, p. 245; Block, in Pharmaceutical Dosage Forms, Lieberman, Rieger and Banker (Eds.), 1988, Marcel Dekker, Inc., New York, N.Y., volume 1, p. 335). Compared to conventional emulsions, microemulsions offer the advantage of solubilizing water-insoluble drugs in a formulation of thermodynamically stable droplets that are formed spontaneously.

[0416] Surfactants used in the preparation of microemulsions include, but are not limited to, ionic surfactants, non-ionic surfactants, Brij 96, polyoxyethylene oleyl ethers, polyglycerol fatty acid esters, tetraglycerol monolaurate (ML310), tetraglycerol monooleate (MO310), hexaglycerol monooleate (PO310), hexaglycerol pentaoleate (PO500), decaglycerol monocaprate (MCA750), decaglycerol monooleate (MO750), decaglycerol sequioleate (SO750), decaglycerol decaoleate (DAO750), alone or in combination with cosurfactants. The cosurfactant, usually a short-chain alcohol such as ethanol, 1-propanol, and 1-butanol, serves to increase the interfacial fluidity by penetrating into the surfactant film and consequently creating a disordered film because of the void space generated among surfactant molecules. Microemulsions can, however, be prepared without the use of cosurfactants and alcohol-free self-emulsifying microemulsion systems are known in the art. The aqueous phase can typically be, but is not limited to, water, an aqueous solution of the drug, glycerol, PEG300, PEG400, polyglycerols, propylene glycols, and derivatives of ethylene glycol. The oil phase can include, but is not limited to, materials such as Captex 300, Captex 355, Capmul MCM, fatty acid esters, medium chain (C8-C12) mono, di, and tri-glycerides, polyoxyethylated glyceryl fatty acid esters, fatty alcohols, polyglycolized glycerides, saturated polyglycolized C8-C10 glycerides, vegetable oils and silicone oil.

[0417] Microemulsions are particularly of interest from the standpoint of drug solubilization and the enhanced absorption of drugs. Lipid based microemulsions (both o/w and w/o) have been proposed to enhance the oral bioavailability of drugs, including peptides (see e.g., U.S. Pat. Nos. 6,191,105; 7,063,860; 7,070,802; 7,157,099; Constantinides et al., Pharmaceutical Research, 1994, 11, 1385-1390; Ritschel, Meth. Find. Exp. Clin. Pharmacol., 1993, 13, 205). Microemulsions afford advantages of improved drug solubilization, protection of drug from enzymatic hydrolysis, possible enhancement of drug absorption due to surfactant-induced alterations in membrane fluidity and permeability, ease of preparation, ease of oral administration over solid dosage forms, improved clinical potency, and decreased toxicity (see e.g., U.S. Pat. Nos. 6,191,105; 7,063,860; 7,070,802; 7,157,099; Constantinides et al., Pharmaceutical Research, 1994, 11, 1385; Ho et al., J. Pharm. Sci., 1996, 85, 138-143). Often microemulsions can form spontaneously when their components are brought together at ambient temperature. This can be particularly advantageous when formulating thermolabile drugs, peptides or iRNAs. Microemulsions have also been effective in the transdermal delivery of active components in both cosmetic and pharmaceutical applications. It is expected that the microemulsion compositions and formulations of the present invention will facilitate the increased systemic absorption of iRNAs and nucleic acids from the gastrointestinal tract, as well as improve the local cellular uptake of iRNAs and nucleic acids.

[0418] Microemulsions of the present invention can also contain additional components and additives such as sorbitan monostearate (Grill 3), Labrasol, and penetration enhancers to improve the properties of the formulation and to enhance the absorption of the iRNAs and nucleic acids of the present invention. Penetration enhancers used in the microemulsions of the present invention can be classified as belonging to one of five broad categories—surfactants, fatty acids, bile salts, chelating agents, and non-chelating non-surfactants (Lee et al., Critical Reviews in Therapeutic Drug Carrier Systems, 1991, p. 92). Each of these classes has been discussed above.

iii. Microparticles

[0419] An RNAi agent of the invention may be incorporated into a particle, e.g., a microparticle. Microparticles can be produced by spray-drying, but may also be produced by other methods including lyophilization, evaporation, fluid bed drying, vacuum drying, or a combination of these techniques.

iv. Penetration Enhancers

[0420] In one embodiment, the present invention employs various penetration enhancers to effect the efficient delivery of nucleic acids, particularly iRNAs, to the skin of animals. Most drugs are present in solution in both ionized and nonionized forms. However, usually only lipid soluble or lipophilic drugs readily cross cell membranes. It has been discovered that even non-lipophilic drugs can cross cell membranes if the membrane to be crossed is treated with a penetration enhancer. In addition to aiding the diffusion of non-lipophilic drugs across cell membranes, penetration enhancers also enhance the permeability of lipophilic drugs.

[0421] Penetration enhancers can be classified as belonging to one of five broad categories, i.e., surfactants, fatty acids, bile salts, chelating agents, and non-chelating non-surfactants (see e.g., Malmsten, M. Surfactants and polymers in drug delivery, Informa Health Care, New York, NY, 2002; Lee et al., Critical Reviews in Therapeutic Drug Carrier Systems, 1991, p. 92). Each of the above mentioned classes of penetration enhancers are described below in greater detail. Such compounds are well known in the art.

v. Carriers

[0422] Certain compositions of the present invention also incorporate carrier compounds in the formulation. As used herein, “carrier compound” or “carrier” can refer to a nucleic acid, or analog thereof, which is inert (i.e., does not possess biological activity per se) but is recognized as a nucleic acid by in vivo processes that reduce the bioavailability of a nucleic acid having biological activity by, for example, degrading the biologically active nucleic acid or promoting its removal from circulation. The coadministration of a nucleic acid and a carrier compound, typically with an excess of the latter substance, can result in a substantial reduction of the amount of nucleic acid recovered in the liver, kidney or other extracirculatory reservoirs, presumably due to competition between the carrier compound and the nucleic acid for a common receptor. For example, the recovery of a partially phosphorothioate dsRNA in hepatic tissue can be reduced when it is coadministered with polyinosinic acid, dextran sulfate, polycytidic acid or 4-acetamido-4′isothiocyano-stilbene-2,2′-disulfonic acid (Miyao et al., DsRNA Res. Dev., 1995, 5, 115-121; Takakura et al., DsRNA & Nucl. Acid Drug Dev., 1996, 6, 177-183.

vi. Excipients

[0423] In contrast to a carrier compound, a “pharmaceutical carrier” or “excipient” is a pharmaceutically acceptable solvent, suspending agent or any other pharmacologically inert vehicle for delivering one or more nucleic acids to an animal. The excipient can be liquid or solid and is selected, with the planned manner of administration in mind, so as to provide for the desired bulk, consistency, etc., when combined with a nucleic acid and the other components of a given pharmaceutical composition. Typical pharmaceutical carriers include, but are not limited to, binding agents (e.g., pregelatinized maize starch, polyvinylpyrrolidone or hydroxypropyl methylcellulose, etc.); fillers (e.g., lactose and other sugars, microcrystalline cellulose, pectin, gelatin, calcium sulfate, ethyl cellulose, polyacrylates or calcium hydrogen phosphate, etc.); lubricants (e.g., magnesium stearate, talc, silica, colloidal silicon dioxide, stearic acid, metallic stearates, hydrogenated vegetable oils, corn starch, polyethylene glycols, sodium benzoate, sodium acetate, etc.); disintegrants (e.g., starch, sodium starch glycolate, etc.); and wetting agents (e.g., sodium lauryl sulphate, etc).

[0424] Pharmaceutically acceptable organic or inorganic excipients suitable for non-parenteral administration which do not deleteriously react with nucleic acids can also be used to formulate the compositions of the present invention. Suitable pharmaceutically acceptable carriers include, but are not limited to, water, salt solutions, alcohols, polyethylene glycols, gelatin, lactose, amylose, magnesium stearate, talc, silicic acid, viscous paraffin, hydroxymethylcellulose, polyvinylpyrrolidone and the like.

[0425] Formulations for topical administration of nucleic acids can include sterile and non-sterile aqueous solutions, non-aqueous solutions in common solvents such as alcohols, or solutions of the nucleic acids in liquid or solid oil bases. The solutions can also contain buffers, diluents and other suitable additives. Pharmaceutically acceptable organic or inorganic excipients suitable for non-parenteral administration which do not deleteriously react with nucleic acids can be used.

[0426] Suitable pharmaceutically acceptable excipients include, but are not limited to, water, salt solutions, alcohol, polyethylene glycols, gelatin, lactose, amylose, magnesium stearate, talc, silicic acid, viscous paraffin, hydroxymethylcellulose, polyvinylpyrrolidone and the like.

vii. Other Components

[0427] The compositions of the present invention can additionally contain other adjunct components conventionally found in pharmaceutical compositions, at their art-established usage levels. Thus, for example, the compositions can contain additional, compatible, pharmaceutically-active materials such as, for example, antipruritics, astringents, local anesthetics or anti-inflammatory agents, or can contain additional materials useful in physically formulating various dosage forms of the compositions of the present invention, such as dyes, flavoring agents, preservatives, antioxidants, opacifiers, thickening agents and stabilizers. However, such materials, when added, should not unduly interfere with the biological activities of the components of the compositions of the present invention. The formulations can be sterilized and, if desired, mixed with auxiliary agents, e.g., lubricants, preservatives, stabilizers, wetting agents, emulsifiers, salts for influencing osmotic pressure, buffers, colorings, flavorings and/or aromatic substances and the like which do not deleteriously interact with the nucleic acid(s) of the formulation.

[0428] Aqueous suspensions can contain substances which increase the viscosity of the suspension including, for example, sodium carboxymethylcellulose, sorbitol and/or dextran. The suspension can also contain stabilizers.

[0429] In some embodiments, pharmaceutical compositions featured in the invention include (a) one or more iRNA agents of the invention and (b) one or more agents which function by a non-RNAi mechanism and which are useful in treating a APCS-associated disease or disorder, e.g., amyloidosis, Alzheimer's disease or coronary atherosclerotic heart disease.

[0430] Toxicity and therapeutic efficacy of iRNA agents of the invention can be determined by standard pharmaceutical procedures in cell cultures or experimental animals, e.g., for determining the LD50 (the dose lethal to 50% of the population) and the ED50 (the dose therapeutically effective in 50% of the population). The dose ratio between toxic and therapeutic effects is the therapeutic index and it can be expressed as the ratio LD₅₀/ED₅₀. Compounds that exhibit high therapeutic indices are preferred.

[0431] The data obtained from cell culture assays and animal studies can be used in formulating a range of dosage for use in humans. The dosage of compositions featured herein in the invention lies generally within a range of circulating concentrations that include the ED₅₀ with little or no toxicity. The dosage can vary within this range depending upon the dosage form employed and the route of administration utilized. For any compound used in the methods featured in the invention, the therapeutically effective dose can be estimated initially from cell culture assays. A dose can be formulated in animal models to achieve a circulating plasma concentration range of the compound or, when appropriate, of the polypeptide product of a target sequence (e.g., achieving a decreased concentration of the polypeptide) that includes the IC₅₀ (i.e., the concentration of the test compound which achieves a half-maximal inhibition of symptoms) as determined in cell culture. Such information can be used to more accurately determine useful doses in humans. Levels in plasma can be measured, for example, by high performance liquid chromatography.

[0432] In addition to their administration, as discussed above, the iRNAs featured in the invention can be administered in combination with other known agents effective in treatment of pathological processes mediated by APCS expression. In any event, the administering physician can adjust the amount and timing of iRNA administration on the basis of results observed using standard measures of efficacy known in the art or described herein.

### VII. Methods for Inhibiting APCS Expression

[0433] The present invention provides methods of inhibiting expression of an APCS gene as described herein. In one aspect, the present invention provides methods of inhibiting expression of APCS in a cell. The methods include contacting a cell with an RNAi agent, e.g., a double stranded RNAi agent, in an amount effective to inhibit expression of the APCS in the cell, thereby inhibiting expression of the APCS in the cell.

[0434] Contacting of a cell with an RNAi agent, e.g., a double stranded RNAi agent, may be done in vitro or in vivo. Contacting a cell in vivo with the RNAi agent includes contacting a cell or group of cells within a subject, e.g., a human subject, with the RNAi agent. Combinations of in vitro and in vivo methods of contacting a cell or a group of cells are also possible. Contacting a cell or a group of cells may be direct or indirect. Thus, for example, the RNAi agent may be put into physical contact with the cell by the individual performing the method, or alternatively, the RNAi agent may be put into a situation that will permit or cause it to subsequently come into contact with the cell. Furthermore, contacting a cell or a group of cells may be accomplished via a targeting ligand, including any ligand described herein or known in the art. In preferred embodiments, the targeting ligand is a carbohydrate moiety, e.g., a GalNAc3 ligand, or any other ligand that directs the RNAi agent to a site of interest, e.g., the liver of a subject.

[0435] Contacting a cell in vitro may be done, for example, by incubating the cell with the RNAi agent. Contacting a cell in vivo may be done, for example, by injecting the RNAi agent into or near the tissue where the cell is located, or by injecting the RNAi agent into another area, e.g., the bloodstream or the subcutaneous space, such that the agent will subsequently reach the tissue where the cell to be contacted is located. For example, the RNAi agent may contain and/or be coupled to a ligand, e.g., GalNAc3, that directs the RNAi agent to a site of interest, e.g., the liver. Combinations of in vitro and in vivo methods of contacting are also possible. For example, a cell may also be contacted in vitro with an RNAi agent and subsequently transplanted into a subject.

[0436] The term “inhibiting,” as used herein, is used interchangeably with “reducing,” “silencing,” “downregulating”, “suppressing”, and other similar terms, and includes any level of inhibition. Preferably inhibiting includes a statistically significant or clinically significant inhibition.

[0437] The phrase “inhibiting expression of a APCS gene” is intended to refer to inhibition of expression of any APCS gene (such as, e.g., a mouse APCS gene, a rat APCS gene, a monkey APCS gene, or a human APCS gene) as well as variants or mutants of an APCS gene.

[0438] The phrase “inhibiting expression of a APCS gene” is intended to refer to inhibition of expression of any APCS gene (such as, e.g., a mouse APCS gene, a rat APCS gene, a monkey APCS gene, or a human APCS gene) as well as variants or mutants of an APCS gene. Thus, the APCS gene may be a wild-type APCS gene, a mutant APCS gene, or a transgenic APCS gene in the context of a genetically manipulated cell, group of cells, or an organism.

[0439] “Inhibiting expression of an APCS gene” includes any level of inhibition of an APCS gene, e.g., at least partial suppression of the expression of an APCS gene. The expression of the APCS gene may be assessed based on the level, or the change in the level, of any variable associated with APCS gene expression, e.g., APCS mRNA level, APCS protein level (SAP), or the severity of an APCS-associated disease. This level may be assessed in an individual cell or in a group of cells, including, for example, a sample derived from a subject.

[0440] In some embodiments of the methods of the invention, expression of an APCS gene, is inhibited by at least about 5%, at least about 10%, at least about 15%, at least about 20%, at least about 25%, at least about 30%, at least about 35%, at least about 40%, at least about 45%, at least about 50%, at least about 55%, at least about 60%, at least about 65%, at least about 70%, at least about 75%, at least about 80%, at least about 85%, at least about 90%, at least about 91%, at least about 92%, at least about 93%, at least about 94%, at least about 95%, at least about 96%, at least about 97%, at least about 98%, or at least about 99%%, or to below the level of detection of the assay. In some embodiments, the inhibition of expression of an APCS gene results in normalization of the level of the APCS gene, such that the difference between the level before treatment and a normal control level is reduced by at least 30%, 35%, 40%, 45%, 50%, 55%, 60%, 65%, 70%, 75%, 80%, 85%, 90%, or 95%. In some embodiments, the inhibition is a clinically relevant inhibition.

[0441] Inhibition of the expression of the target gene, e.g., an APCS gene may be manifested by a reduction of the amount of mRNA expressed by a first cell or group of cells (such cells may be present, for example, in a sample derived from a subject) in which a target gene is transcribed and which has or have been treated (e.g., by contacting the cell or cells with an RNAi agent of the invention, or by administering an RNAi agent of the invention to a subject in which the cells are or were present) such that the expression of a target gene is inhibited, as compared to a second cell or group of cells substantially identical to the first cell or group of cells but which has not or have not been so treated (control cell(s)). In preferred embodiments, the inhibition is assessed by the rtPCR method, with in vitro assays being performed in an appropriately matched cell line with the duplex at a 10 nM concentration, and expressing the level of mRNA in treated cells as a percentage of the level of mRNA in control cells, using the following formula:

$$\frac{( mRNA in control cells ) - ( mRNA in treated cells )}{( mRNA in control cells )} \cdot 100 \%$$

[0442] Alternatively, inhibition of the expression of an APCS gene may be assessed in terms of a reduction of a parameter that is functionally linked to APCS gene expression, e.g., APCS protein expression. APCS gene silencing may be determined in any cell expressing an APCS gene, either constitutively or by genomic engineering, and by any assay known in the art.

[0443] Inhibition of the expression of an APCS gene may be manifested by a reduction in the level of the protein encoded by the APCS gene (SAP) that is produced by a cell or group of cells (e.g., the level of protein produced in a sample derived from a subject). As explained above for the assessment of mRNA suppression, the inhibition of protein expression levels in a treated cell or group of cells may similarly be expressed as a percentage of the level of protein in a control cell or group of cells.

[0444] A control cell or group of cells that may be used to assess the inhibition of the expression of a target gene includes a cell or group of cells that has not yet been contacted with an RNAi agent of the invention. For example, the control cell or group of cells may be derived from an individual subject (e.g., a human or animal subject) prior to treatment of the subject with an RNAi agent. In alternative embodiments, the level may be compared to an appropriate control sample, e.g., a known population control sample.

[0445] The level of APCS mRNA that is expressed by a cell or group of cells may be determined using any method known in the art for assessing mRNA expression. In one embodiment, the level of expression of APCS in a sample is determined by detecting a transcribed polynucleotide, or portion thereof, e.g., mRNA of the APCS gene. RNA may be extracted from cells using RNA extraction techniques including, for example, using acid phenol/guanidine isothiocyanate extraction (RNAzol B; Biogenesis), RNeasy RNA preparation kits (Qiagen) or PAXgene (PreAnalytix, Switzerland). Typical assay formats utilizing ribonucleic acid hybridization include nuclear run-on assays, RT-PCR, RNase protection assays (Melton et al., Nuc. Acids Res. 12:7035), Northern blotting, in situ hybridization, and microarray analysis. Circulating APCS mRNA may be detected using methods the described in PCT Publication No. WO 2012/177906, the entire contents of which are hereby incorporated herein by reference.

[0446] In one embodiment, the level of expression of APCS is determined using a nucleic acid probe. The term “probe”, as used herein, refers to any molecule that is capable of selectively binding to a specific APCS. Probes can be synthesized by one of skill in the art, or derived from appropriate biological preparations. Probes may be specifically designed to be labeled. Examples of molecules that can be utilized as probes include, but are not limited to, RNA, DNA, proteins, antibodies, and organic molecules.

[0447] Isolated mRNA can be used in hybridization or amplification assays that include, but are not limited to, Southern or Northern analyses, polymerase chain reaction (PCR) analyses and probe arrays. One method for the determination of mRNA levels involves contacting the isolated mRNA with a nucleic acid molecule (probe) that can hybridize, e.g., specifically hybridize, to APCS mRNA. In one embodiment, the mRNA is immobilized on a solid surface and contacted with a probe, for example by running the isolated mRNA on an agarose gel and transferring the mRNA from the gel to a membrane, such as nitrocellulose. In an alternative embodiment, the probe(s) are immobilized on a solid surface and the mRNA is contacted with the probe(s), for example, in an Affymetrix gene chip array. A skilled artisan can readily adapt known mRNA detection methods for use in determining the level of APCS mRNA.

[0448] An alternative method for determining the level of expression of APCS in a sample involves the process of nucleic acid amplification and/or reverse transcriptase (to prepare cDNA) of for example mRNA in the sample, e.g., by RT-PCR (the experimental embodiment set forth in Mullis, 1987, U.S. Pat. No. 4,683,202), ligase chain reaction (Barany (1991) Proc. Natl. Acad. Sci. USA 88:189-193), self sustained sequence replication (Guatelli et al. (1990) Proc. Natl. Acad. Sci. USA 87:1874-1878), transcriptional amplification system (Kwoh et al. (1989) Proc. Natl. Acad. Sci. USA 86:1173-1177), Q-Beta Replicase (Lizardi et al. (1988) Bio/Technology 6:1197), rolling circle replication (Lizardi et al., U.S. Pat. No. 5,854,033) or any other nucleic acid amplification method, followed by the detection of the amplified molecules using techniques well known to those of skill in the art. These detection schemes are especially useful for the detection of nucleic acid molecules if such molecules are present in very low numbers. In particular aspects of the invention, the level of expression of APCS is determined by quantitative fluorogenic RT-PCR (i.e., the TaqMan™ System).

[0449] The expression levels of APCS mRNA may be monitored using a membrane blot (such as used in hybridization analysis such as Northern, Southern, dot, and the like), or microwells, sample tubes, gels, beads or fibers (or any solid support comprising bound nucleic acids). See U.S. Pat. Nos. 5,770,722, 5,874,219, 5,744,305, 5,677,195 and 5,445,934, which are incorporated herein by reference. The determination of APCS expression level may also comprise using nucleic acid probes in solution.

[0450] In preferred embodiments, the level of APCS mRNA expression is assessed using branched DNA (bDNA) assays or real time PCR (qPCR).

[0451] The level of APCS protein (SAP) expression may be determined using any method known in the art for the measurement of protein levels. Such methods include, for example, electrophoresis, capillary electrophoresis, high performance liquid chromatography (HPLC), thin layer chromatography (TLC), hyperdiffusion chromatography, fluid or gel precipitin reactions, absorption spectroscopy, a colorimetric assays, spectrophotometric assays, flow cytometry, immunodiffusion (single or double), immunoelectrophoresis, Western blotting, radioimmunoassay (RIA), enzyme-linked immunosorbent assays (ELISAs), immunofluorescent assays, electrochemiluminescence assays, and the like.

[0452] In some embodiments, the efficacy of the methods of the invention can be monitored by detecting or monitoring a reduction in a symptom of an APCS-associated disease. Symptoms may be assessed in vitro or in vivo using any method known in the art. For example, efficacy of the methods of the invention in treating an APCS-associated disease, such as amyloidosis, may be assessed by measuring levels of SAP in plasma collected from a subject suffering from an APCS-associated disease; measuring an amyloid load by using, e.g., whole-body ¹²³I-SAP scintigraphy; measuring the expansion of the extracellular volume by systemic amyloid deposits by using, e.g., equilibrium magnetic resonance imaging (MRI); or measuring liver stiffness if the amyloidosis has hepatic involvement (see Richards et al., N. Engl. J. Med. 373(12), 1106-1114, 2015). In another example, efficacy of the methods of the invention in treating an APCS-associated disease, such as a cardiovascular disease, e.g., coronary atherosclerotic heart disease, may be assessed by measuring the size of atherosclerotic lesions.

[0453] The term “sample” as used herein refers to a collection of similar fluids, cells, or tissues isolated from a subject, as well as fluids, cells, or tissues present within a subject. Examples of biological fluids include blood, serum and serosal fluids, plasma, lymph, urine, cerebrospinal fluid, saliva, ocular fluids, and the like. Tissue samples may include samples from tissues, organs or localized regions. For example, samples may be derived from particular organs, parts of organs, or fluids or cells within those organs. In certain embodiments, samples may be derived from the liver (e.g., whole liver or certain segments of liver or certain types of cells in the liver, such as, e.g., hepatocytes), the retina or parts or parts of the retina (e.g., retinal pigment epithelium), the central nervous system or parts of the central nervous system (e.g., ventricles or choroid plexus), or the pancreas or certain cells or parts of the pancreas. In preferred embodiments, a “sample derived from a subject” refers to blood drawn from the subject or plasma derived therefrom. In further embodiments, a “sample derived from a subject” refers to liver tissue (or subcomponents thereof) or retinal tissue (or subcomponents thereof) derived from the subject.

[0454] In some embodiments of the methods of the invention, the RNAi agent is administered to a subject such that the RNAi agent is delivered to a specific site within the subject. The inhibition of expression of APCS may be assessed using measurements of the level or change in the level of APCS mRNA and/or APCS protein in a sample derived from fluid or tissue from the specific site within the subject. In preferred embodiments, the site is the liver. The site may also be a subsection or subgroup of cells from any one of the aforementioned sites. The site may also include cells that express a particular type of receptor.

### VIII. Methods for Treating or Preventing an APCS-Associated Disease or Disorder

[0455] The present invention provides therapeutic and prophylactic methods which include administering to a subject having an APCS-associated disease, as described herein, e.g., amyloidosis, Alzheimer's disease or coronary atherosclerotic heart disease, an iRNA agent, pharmaceutical composition comprising an iRNA agent, or vector comprising an iRNA of the invention.

[0456] In one aspect, the present invention provides methods of treating a subject having a disorder that would benefit from reduction in APCS expression, e.g., an APCS-associated disease, e.g., amyloidosis, Alzheimer's disease or coronary atherosclerotic heart disease. The treatment methods (and uses) of the invention include administering to the subject, e.g., a human, a therapeutically effective amount of an iRNA agent targeting an APCS gene or a pharmaceutical composition comprising an iRNA agent targeting an APCS gene, thereby treating the subject having a disorder that would benefit from reduction in APCS expression.

[0457] In one aspect, the invention provides methods of preventing at least one symptom in a subject having a disorder that would benefit from reduction in APCS expression, e.g., an amyloid-associated disease, e.g., amyloidosis, Alzheimer's disease or coronary atherosclerotic heart disease. The methods include administering to the subject a therapeutically effective amount of the iRNA agent, e.g., dsRNA, or vector of the invention, thereby preventing at least one symptom in the subject having a disorder that would benefit from reduction in APCS expression. For example, the invention provides methods for preventing formation of, or reducing the size of amyloid deposits or atherosclerotic lesions in a subject suffering from a disorder that would benefit from reduction in APCS expression, e.g., amyloidosis, Alzheimer's disease or coronary atherosclerotic heart disease.

[0458] In another aspect, the present invention provides uses of a therapeutically effective amount of an iRNA agent of the invention for treating a subject, e.g., a subject that would benefit from a reduction and/or inhibition of APCS expression.

[0459] In yet another aspect, the present invention provides uses of an iRNA agent, e.g., a dsRNA, of the invention targeting an APCS gene or a pharmaceutical composition comprising an iRNA agent targeting an APCS gene in the manufacture of a medicament for treating a subject, e.g., a subject that would benefit from a reduction and/or inhibition of APCS expression, such as a subject having a disorder that would benefit from reduction in APCS expression, e.g., amyloidosis, Alzheimer's disease or coronary atherosclerotic heart disease.

[0460] In another aspect, the invention provides uses of an iRNA, e.g., a dsRNA, of the invention for preventing at least one symptom in a subject suffering from a disorder that would benefit from a reduction and/or inhibition of APCS expression, such as an APCS-associated disease, e.g., amyloidosis, Alzheimer's disease or coronary atherosclerotic heart disease.

[0461] In a further aspect, the present invention provides uses of an iRNA agent of the invention in the manufacture of a medicament for preventing at least one symptom in a subject suffering from a disorder that would benefit from a reduction and/or inhibition of APCS expression, such as an APCS-associated disease, e.g., amyloidosis, Alzheimer's disease or coronary atherosclerotic heart disease.

[0462] In one embodiment, an iRNA agent targeting APCS is administered to a subject having an APCS-associated disease such that the expression of a APCS gene, e.g., in a cell, tissue, blood or other tissue or fluid of the subject is reduced by at least about 10%, 11%, 12%, 13%, 14%, 15%, 16%, 17%, 18%, 19%, 20%, 21%, 22%, 23%, 24%, 25%, 26%, 27%, 28%, 29%, 30%, 31%, 32%, 33%, 34%, 35%, 36%, 37%, 38%, 39%, 40%, 41%, 42%, 43%, 44%, 45%, 46%, 47%, 48%, 49%, 50%, 51%, 52%, 53%, 54%, 55%, 56%, 57%, 58%, 59%, 60%, 61%, 62%, 62%, 64%, 65%, 66%, 67%, 68%, 69%, 70%, 71%, 72%, 73%, 74%, 75%, 76%, 77%, 78%, 79%, 80%, 81%, 82%, 83%, 84%, 85%, 86%, 87%, 88%, 89%, 90%, 91%, 92%, 93%, 94%, 95%, 96%, 97%, 98%, or at least about 99% or more, or to a level below the level of detection of the assay, when the dsRNA agent is administered to the subject.

[0463] The methods and uses of the invention include administering a composition described herein such that expression of the target APCS gene is decreased for an extended duration, e.g., at least one month, preferably at least three months.

[0464] Administration of the dsRNA according to the methods and uses of the invention may result in a reduction of the severity, signs, symptoms, and/or markers of such diseases or disorders in a patient with an APCS-associated disease. By “reduction” in this context is meant a statistically or clinically significant decrease in such level. The reduction can be, for example, at least about 5%, 10%, 15%, 20%, 25%, 30%, 35%, 40%, 45%, 50%, 55%, 60%, 65%, 70%, 75%, 80%, 85%, 90%, 95%, or about 100%.

[0465] Efficacy of treatment or prevention of disease can be assessed, for example by measuring disease progression, disease remission, symptom severity, reduction in pain, quality of life, dose of a medication required to sustain a treatment effect, level of a disease marker or any other measurable parameter appropriate for a given disease being treated or targeted for prevention. It is well within the ability of one skilled in the art to monitor efficacy of treatment or prevention by measuring any one of such parameters, or any combination of parameters. Comparison of the later readings with the initial readings, or historically relevant population controls, provide a physician an indication of whether the treatment is effective. It is well within the ability of one skilled in the art to monitor efficacy of treatment or prevention by measuring any one of such parameters, or any combination of parameters. In connection with the administration of an iRNA targeting an APCS or pharmaceutical composition thereof, “effective against” an APCS-associated disease indicates that administration in a clinically appropriate manner results in a beneficial effect for at least a statistically significant fraction of patients, such as improvement of symptoms, a cure, a reduction in disease, extension of life, improvement in quality of life, or other effect generally recognized as positive by medical doctors familiar with treating an APCS-associated disease and the related causes.

[0466] A treatment or preventive effect is evident when there is a statistically significant improvement in one or more parameters of disease status, or by a failure to worsen or to develop symptoms where they would otherwise be anticipated. As an example, a favorable change of at least 10% in a measurable parameter of disease, and preferably at least 20%, 30%, 40%, 50% or more can be indicative of effective treatment. Efficacy for a given iRNA drug or formulation of that drug can also be judged using an experimental animal model for the given disease as known in the art. When using an experimental animal model, efficacy of treatment is evidenced when a statistically significant reduction in a marker or symptom is observed.

[0467] Subjects can be administered a therapeutic amount of iRNA, such as about 0.01 mg/kg to about 200 mg/kg. Values and ranges intermediate to the recited values are also intended to be part of this invention. Typically, a suitable dose of an iRNA of the invention will be in the range of about 0.1 mg/kg to about 5.0 mg/kg, preferably about 0.3 mg/kg and about 3.0 mg/kg.

[0468] The iRNA can be administered by intravenous infusion over a period of time, on a regular basis, e.g., once per month, once every other month, once per quarter.

[0469] In certain embodiments, one or more loading doses is administered.

[0470] Administration of the iRNA can reduce the presence of an APCS protein (SAP), e.g., in a cell, tissue, blood, serum, plasma, urine or other compartment of the patient by at least about 5%, 6%, 7%, 8%, 9%, 10%, 11%, 12%, 13%, 14%, 15%, 16%, 17%, 18%, 19%, 20%, 21%, 22%, 23%, 24%, 25%, 26%, 27%, 28%, 29%, 30%, 31%, 32%, 33%, 34%, 35%, 36%, 37%, 38%, 39%, 40%, 41%, 42%, 43%, 44%, 45%, 46%, 47%, 48%, 49%, 50%, 51%, 52%, 53%, 54%, 55%, 56%, 57%, 58%, 59%, 60%, 61%, 62%, 63%, 64%, 65%, 66%, 67%, 68%, 69%, 70%, 71%, 72%, 73%, 74%, 75%, 76%, 77%, 78%, 79%, 80%, 81%, 82%, 83%, 84%, 85%, 86%, 87%, 88%, 89%, 90%, 91%, 92%, 93%, 94%, 95%, 96%, 97%, 98%, or at least about 99% or more, or below the level of detection of the assay method used.

[0471] Before administration of a full dose of the iRNA, patients can be administered a smaller dose, such as a 5% infusion, and monitored for adverse effects, such as an allergic reaction. In another example, the patient can be monitored for unwanted immunostimulatory effects, such as increased cytokine (e.g., TNF-alpha or INF-alpha) levels.

[0472] Owing to the inhibitory effects on APCS gene expression, a composition according to the invention or a pharmaceutical composition prepared therefrom can enhance the quality of life.

[0473] An iRNA of the invention may be administered in “naked” form, where the modified or unmodified iRNA agent is directly suspended in aqueous or suitable buffer solvent, as a “free iRNA.” A free iRNA is administered in the absence of a pharmaceutical composition. The free iRNA may be in a suitable buffer solution. The buffer solution may comprise acetate, citrate, prolamine, carbonate, or phosphate, or any combination thereof. In one embodiment, the buffer solution is phosphate buffered saline (PBS). The pH and osmolarity of the buffer solution containing the iRNA can be adjusted such that it is suitable for administering to a subject.

[0474] Alternatively, an iRNA of the invention may be administered as a pharmaceutical composition, such as a dsRNA liposomal formulation.

[0475] Subjects that would benefit from a reduction and/or inhibition of APCS gene expression are those having an APCS-associated disease or disorder as described herein.

[0476] Treatment of a subject that would benefit from a reduction and/or inhibition of APCS gene expression includes therapeutic and prophylactic treatment.

[0477] Subjects that would benefit from a reduction and/or inhibition of APCS gene expression are those having an APCS-associated disease or disorder as described herein. In one embodiment, an APCS-associated disease is an amyloid-associated disease, such as amyloidosis, e.g., such as primary (systemic AL) amyloidosis, secondary (systemic AA) amyloidosis, dialysis-related amyloidosis (DRA), familial (hereditary FA) amyloidosis, senile systemic amyloidosis (SSA) or organ-specific amyloidosis.

[0478] In another embodiment, the amyloid-associated disease is Alzheimer's disease.

[0479] In another embodiment, the amyloid associated disease is diabetes mellitus type 2; Parkinson's disease; transmissible spongiform encephalopathy (such as bovine spongiform encephalopathy); fatal familial insomnia; Huntington's disease; medullary carcinoma of the thyroid; cardiac arrhythmias; isolated atrial amyloidosis; rheumatoid arthritis; aortic medial amyloid; prolactinoma; familial amyloid polyneuropathy; lattice corneal dystrophy; cerebral amyloid angiopathy; cerebral amyloid angiopathy (Icelandic type); sporadic inclusion body myositis

[0480] In another embodiment, an APCS-associated disease is a cardiovascular disease, e.g., coronary atherosclerotic heart disease.

[0481] The invention further provides methods and uses of an iRNA agent or a pharmaceutical composition thereof for treating a subject that would benefit from reduction and/or inhibition of APCS gene expression, e.g., a subject having an APCS-associated disease, in combination with other pharmaceuticals and/or other therapeutic methods, e.g., with known pharmaceuticals and/or known therapeutic methods, such as, for example, those which are currently employed for treating these disorders.

[0482] Accordingly, in some aspects of the invention, the methods which include either a single iRNA agent of the invention, further include administering to the subject one or more additional therapeutic agents.

[0483] The iRNA agent and an additional therapeutic agent and/or treatment may be administered at the same time and/or in the same combination, e.g., parenterally, or the additional therapeutic agent can be administered as part of a separate composition or at separate times and/or by another method known in the art or described herein.

[0484] Additional therapeutics and therapeutic methods suitable for treating a subject that would benefit from reductone in APCS expression, e.g., a subject having an APCS-associated disease, may include (R-1-[6-[R-2-carboxy-pyrrolidin-1-yl]-6-oxo-hexanoyl]pyrrolidine-2-carboxylic acid) (CPHPC), a proline-derived small molecule that is bound by SAP in the circulation to form stable complexes of pairs of native pentameric SAP molecules cross-linked by the drug. These complexes are immediately cleared by the liver, leading to almost complete depletion of plasma SAP for the duration of drug administration (Al-Shawi et al., Open Biol. 6: 150202).

[0485] Additional therapeutics and therapeutic methods suitable for treating a subject that would benefit from reduction in APCS expression, e.g., a subject having an APCS-associated disease, may also include an antibody targeting SAP, such as an anti-SAP antibody, e.g., a monoclonal IgG1 anti-SAP antibody. It is believed that an anti-SAP antibody may activate macrophage destruction of the SAP-containing amyloid deposits in tissues (Al-Shawi et al., Open Biol. 6: 150202).

[0486] Additional therapeutics and therapeutic methods suitable for treating a subject that would benefit from reduction in APCS expression, e.g., a subject having an APCS-associated disease, may also include one or more chemotherapeutic agents, e.g., bortezomib, dexamethasone, melphalan, or combinations thereof.

[0487] Additional therapeutics and therapeutic methods suitable for treating a subject that would benefit from reduction in APCS expression, e.g., a subject having an APCS-associated disease, may also include one or more agents useful for treating cardiovascular disease, e.g., statins, such as atorvastatin (Lipitor), fluvastatin (Lescol), lovastatin, pitavastatin (Livalo), pravastatin (Pravachol), rosuvastatin (Crestor) and simvastatin (Zocor); anti-platelet medications, such as aspirin; beta blockers, such as acebutolol (Sectral), atenolol (Tenormin), bisoprolol (Zebeta), metoprolol (Lopressor, Toprol-XL), Nadolol (Corgard), nebivolol (Bystolic) and propranolol (Inderal LA, InnoPran XL); angiotensin-converting enzyme (ACE) inhibitors, such as benazepril (Lotensin, Lotensin Hct), captopril (Capoten), enalapril (Vasotec), fosinopril (Monopril), Lisinopril (Prinivil, Zestril), moexipril (Univasc), perindopril (Aceon) and quinapril (Accupril); calcium channel blockers, such as amlodipine (Norvasc), diltiazem (Cardizem, Tiazac), felodipine, isradipine, nicardipine, nifedipine (Adalat CC, Afeditab CR, Procardia), nisoldipine (Sular) and verapamil (Calan, Verelan); diuretics, or combinations thereof.

[0488] Additional therapeutics and therapeutic methods suitable for treating a subject that would benefit from reduction in APCS expression, e.g., a subject having an APCS-associated disease, may also include one or more agents useful for treating Alzheimer's disease, e.g., donepezil (Aricept), galantamine (Razadyne), memantine (Namenda), rivastigmine (Exelon), or combinations thereof, e.g., a combination of donepezil and memantine (Namzaric).

[0489] Accordingly, in one aspect, the present invention provides methods of treating a subject having a disorder that would benefit from reduction in APCS expression, e.g., amyloidosis or Alzheimer's disease, which include administering to the subject, e.g., a human, a therapeutically effective amount of an iRNA agent targeting an APCS gene or a pharmaceutical composition comprising an iRNA agent targeting an APCS gene, and an additional therapeutic agent, such as CPHPC and/or an anti-SAP antibody, or antigen-binding fragment thereof, thereby treating the subject having a disorder that would benefit from reduction in APCS expression.

[0490] In another aspect, the invention provides methods of preventing at least one symptom in a subject having a disorder that would benefit from reduction in APCS expression, e.g., an APCS-associated disease, e.g., amyloidosis, Alzheimer's disease or coronary atherosclerotic heart disease. The methods include administering to the subject a therapeutically effective amount of the iRNA agent, e.g., dsRNA, or vector of the invention, and an additional therapeutic agent, such as CPHPC and/or an anti-SAP antibody, or antigen-binding fragment thereof, thereby preventing at least one symptom in the subject having a disorder that would benefit from reduction in APCS expression.

[0491] In another aspect, the present invention provides uses of a therapeutically effective amount of an iRNA agent of the invention and an additional therapeutic agent, such as CPHPC and/or an anti-SAP antibody, or antigen-binding fragment thereof, for treating a subject, e.g., a subject that would benefit from a reduction and/or inhibition of APCS expression.

[0492] In another aspect, the present invention provides uses of an iRNA agent, e.g., a dsRNA, of the invention targeting a APCS gene or a pharmaceutical composition comprising an iRNA agent targeting a APCS gene in the manufacture of a medicament for use in combination with an additional therapeutic agent, such as CPHPC and/or an anti-SAP antibody, or antigen-binding fragment thereof, for treating a subject, e.g., a subject that would benefit from a reduction and/or inhibition of APCS expression, e.g., an APCS-associated disease, e.g., amyloidosis, Alzheimer's disease or coronary atherosclerotic heart disease.

[0493] In yet another aspect, the invention provides uses of an iRNA agent, e.g., a dsRNA, of the invention, and an additional therapeutic agent, such as CPHPC and/or an anti-SAP antibody, or antigen-binding fragment thereof, for preventing at least one symptom in a subject suffering from a disorder that would benefit from a reduction and/or inhibition of APCS expression, such as an APCS-associated disease, e.g., amyloidosis, Alzheimer's disease or coronary atherosclerotic heart disease.

[0494] In a further aspect, the present invention provides uses of an iRNA agent of the invention in the manufacture of a medicament for use in combination with an additional therapeutic agent, such as CPHPC and/or an anti-SAP antibody, or antigen-binding fragment thereof, for preventing at least one symptom in a subject suffering from a disorder that would benefit from a reduction and/or inhibition of APCS expression, such as an APCS-associated disease, e.g., amyloidosis, Alzheimer's disease or coronary atherosclerotic heart disease.

[0495] In one embodiment, an iRNA agent targeting APCS is administered to a subject having an APCS-associated disease as described herein such that APCS levels, e.g., in a cell, tissue, blood, urine or other tissue or fluid of the subject are reduced by at least about 10%, 11%, 12%, 13%, 14%, 15%, 16%, 17%, 18%, 19%, 20%, 21%, 22%, 23%, 24%, 25%, 26%, 27%, 28%, 29%, 30%, 31%, 32%, 33%, 34%, 35%, 36%, 37%, 38%, 39%, 40%, 41%, 42%, 43%, 44%, 45%, 46%, 47%, 48%, 49%, 50%, 51%, 52%, 53%, 54%, 55%, 56%, 57%, 58%, 59%, 60%, 61%, 62%, 62%, 64%, 65%, 66%, 67%, 68%, 69%, 70%, 71%, 72%, 73%, 74%, 75%, 76%, 77%, 78%, 79%, 80%, 81%, 82%, 83%, 84%, 85%, 86%, 87%, 88%, 89%, 90%, 91%, 92%, 93%, 94%, 95%, 96%, 97%, 98%, or at least about 99% or more and, subsequently, an additional therapeutic is administered to the subject.

[0496] The additional therapeutic, e.g., CPHPC and/or an anti-SAP antibody, or antigen-binding fragment thereof, may be administered to the subject at the same time as the iRNA agent targeting APCS or at a different time.

[0497] Moreover, the additional therapeutic, e.g., CPHPC and/or an anti-SAP antibody, or antigen-binding fragment thereof, may be administered to the subject in the same formulation as the iRNA agent targeting APCS or in a different formulation as the iRNA agent targeting APCS.

[0498] The methods and uses of the invention include administering a composition described herein such that expression of the target APCS gene is decreased, such as for about 1, 2, 3, 4, 5, 6, 7, 8, 12, 16, 18, 24, 28, 32, 36, 40, 44, 48, 52, 56, 60, 64, 68, 72, 76, or about 80 hours. In one embodiment, expression of the target gene is decreased for an extended duration, e.g., at least about two, three, four, five, six, seven days or more, e.g., about one week, two weeks, three weeks, or about four weeks or longer.

[0499] The present invention also provides methods of using an iRNA agent of the invention and/or a composition containing an iRNA agent of the invention to reduce and/or inhibit APCS expression in a subject.

[0500] In other aspects, use of an iRNA of the invention and/or a composition comprising an iRNA of the invention for the manufacture of a medicament for reducing and/or inhibiting APCS gene expression in a subject are provided.

[0501] Reduction in gene expression can be assessed by any methods known in the art. For example, a reduction in the expression of an APCS gene may be determined by determining the mRNA expression level of APCS using methods routine to one of ordinary skill in the art, e.g., Northern blotting, qRT-PCR, by determining the protein level of APCS using methods routine to one of ordinary skill in the art, such as Western blotting, immunological techniques, flow cytometry methods, ELISA, and/or by determining a biological activity of APCS.

[0502] APCS gene expression may be inhibited in the cell by at least about 5%, 6%, 7%, 8%, 9%, 10%, 11%, 12%, 13%, 14%, 15%, 16%, 17%, 18%, 19%, 20%, 21%, 22%, 23%, 24%, 25%, 26%, 27%, 28%, 29%, 30%, 31%, 32%, 33%, 34%, 35%, 36%, 37%, 38%, 39%, 40%, 41%, 42%, 43%, 44%, 45%, 46%, 47%, 48%, 49%, 50%, 51%, 52%, 53%, 54%, 55%, 56%, 57%, 58%, 59%, 60%, 61%, 62%, 63%, 64%, 65%, 66%, 67%, 68%, 69%, 70%, 71%, 72%, 73%, 74%, 75%, 76%, 77%, 78%, 79%, 80%, 81%, 82%, 83%, 84%, 85%, 86%, 87%, 88%, 89%, 90%, 91%, 92%, 93%, 94%, 95%, 96%, 97%, 98%, 99%, or about 100%, or below the level of detection of the assay method used.

[0503] APCS protein (SAP) production may be inhibited in the cell by at least about 5%, 6%, 7%, 8%, 9%, 10%, 11%, 12%, 13%, 14%, 15%, 16%, 17%, 18%, 19%, 20%, 21%, 22%, 23%, 24%, 25%, 26%, 27%, 28%, 29%, 30%, 31%, 32%, 33%, 34%, 35%, 36%, 37%, 38%, 39%, 40%, 41%, 42%, 43%, 44%, 45%, 46%, 47%, 48%, 49%, 50%, 51%, 52%, 53%, 54%, 55%, 56%, 57%, 58%, 59%, 60%, 61%, 62%, 63%, 64%, 65%, 66%, 67%, 68%, 69%, 70%, 71%, 72%, 73%, 74%, 75%, 76%, 77%, 78%, 79%, 80%, 81%, 82%, 83%, 84%, 85%, 86%, 87%, 88%, 89%, 90%, 91%, 92%, 93%, 94%, 95%, 96%, 97%, 98%, 99%, or about 100%, or below the level of detection of the assay method used.

[0504] The in vivo methods and uses of the invention may include administering to a subject a composition containing an iRNA, where the iRNA includes a nucleotide sequence that is complementary to at least a part of an RNA transcript of the APCS gene of the mammal to be treated. When the organism to be treated is a human, the composition can be administered by any means known in the art including, but not limited to subcutaneous, intravenous, oral, intraperitoneal, or parenteral routes, including intracranial (e.g., intraventricular, intraparenchymal and intrathecal), intramuscular, transdermal, airway (aerosol), nasal, rectal, and topical (including buccal and sublingual) administration. In certain embodiments, the compositions are administered by subcutaneous or intravenous infusion or injection. In one embodiment, the compositions are administered by subcutaneous injection. In some embodiments, the compositions are administered by intravenous infusion.

[0505] In some embodiments, the administration is via a depot injection. A depot injection may release the iRNA in a consistent way over a prolonged time period. Thus, a depot injection may reduce the frequency of dosing needed to obtain a desired effect, e.g., a desired inhibition of APCS, or a therapeutic or prophylactic effect. A depot injection may also provide more consistent serum concentrations. Depot injections may include subcutaneous injections or intramuscular injections. In preferred embodiments, the depot injection is a subcutaneous injection.

[0506] In some embodiments, the administration is via a pump. The pump may be an external pump or a surgically implanted pump. In certain embodiments, the pump is a subcutaneously implanted osmotic pump. In other embodiments, the pump is an infusion pump. An infusion pump may be used for intravenous, subcutaneous, arterial, or epidural infusions. In preferred embodiments, the infusion pump is a subcutaneous infusion pump. In other embodiments, the pump is a surgically implanted pump that delivers the iRNA to the subject.

[0507] The mode of administration may be chosen based upon whether local or systemic treatment is desired and based upon the area to be treated. The route and site of administration may be chosen to enhance targeting.

[0508] In one aspect, the present invention also provides methods for inhibiting the expression of an APCS gene in a subject, such as a mammal, e.g., a human. The present invention also provides a composition comprising an iRNA, e.g., a dsRNA, that targets an APCS gene in a cell of a subject, such as a mammal, for use in inhibiting expression of the APCS gene in the subject, such as a mammal. In another aspect, the present invention provides use of an iRNA, e.g., a dsRNA, that targets a APCS gene in a cell of a subject, such as a mammal, in the manufacture of a medicament for inhibiting expression of an APCS gene in the subject, such as a mammal.

[0509] The methods and uses include administering to a subject, such as a mammal, e.g., a human, a composition comprising an iRNA, e.g., a dsRNA, that targets an APCS gene in a cell of the subject, e.g., a mammal, and maintaining the mammal for a time sufficient to obtain degradation of the mRNA transcript of the APCS gene, thereby inhibiting expression of the APCS gene in the mammal.

[0510] In one embodiment, verification of RISC medicated cleavage of target in vivo following administration of iRNA agent is done by performing 5′-RACE or modifications of the protocol as known in the art (Lasham A et al., (2010) Nucleic Acid Res., 38 (3) p-e19) (Zimmermann et al. (2006) Nature 441: 111-4).

[0511] Unless otherwise defined, all technical and scientific terms used herein have the same meaning as commonly understood by one of ordinary skill in the art to which this invention belongs. Although methods and materials similar or equivalent to those described herein can be used in the practice or testing of the iRNAs and methods featured in the invention, suitable methods and materials are described below. All publications, patent applications, patents, and other references mentioned herein are incorporated by reference in their entirety. In case of conflict, the present specification, including definitions, will control. In addition, the materials, methods, and examples are illustrative only and not intended to be limiting.

### EXAMPLES

### Example 1. iRNA Synthesis

### Source of Reagents

[0512] Where the source of a reagent is not specifically given herein, such reagent can be obtained from any supplier of reagents for molecular biology at a quality/purity standard for application in molecular biology.

### Bioinformatics

[0513] A set of siRNAs targeting the human SAP or APCS, “amyloid P component, serum” (human: NCBI refseqlD NM_001639; NCBI GeneID: 325) as well as toxicology-species APCS orthologs (cynomolgus monkey: XM_005541312; mouse: NM_011318; rat: NM_017170) were designed using custom R and Python scripts. The human NM_001639 REFSEQ mRNA, version 3, has a length of 960 bases. The rationale and method for the set of siRNA designs is as follows: the predicted efficacy for every potential 19mer siRNA from position 10 through the end was determined with a linear model derived the direct measure of mRNA knockdown from more than 20,000 distinct siRNA designs targeting a large number of vertebrate genes. A subset of the APCS siRNAs was designed with perfect or near-perfect matches between human and cynomolgus monkey. A further subset was designed with perfect or near-perfect matches between mouse and rat APCS orthologs. A further subset was designed with perfect matches to human APCS. For each strand of the siRNA, a custom Python script was used in a brute force search to measure the number and positions of mismatches between the siRNA and all potential alignments in the target species transcriptome. Extra weight was given to mismatches in the seed region, defined here as positions 2-9 of the antisense oligonucleotide, as well the cleavage site of the siRNA, defined here as positions 10-11 of the antisense oligonucleotide. The relative weight of the mismatches was 2.8; 1.2: 1 for seed mismatches, cleavage site, and other positions up through antisense position 19. Mismatches in the first position were ignored. A specificity score was calculated for each strand by summing the value of each weighted mismatch. Preference was given to siRNAs whose antisense score in human was >=2.2 and predicted efficacy was >=50% knockdown.

[0514] A detailed list of the unmodified SAP sense and antisense strand sequences is shown in Tables 3A and 3B. A detailed list of the modified SAP sense and antisense strand sequences is shown in Table 4A and 4B.

TABLE 2
Abbreviations of nucleotide monomers used in nucleic acid sequence
representation.
It will be understood that these monomers,
when present in an oligonucleotide, are mutually
linked by 5′-3′-phosphodiester bonds.

| Abbreviation | Nucleotide(s) |
|---|---|
| A | Adenosine-3′-phosphate |
| Af | 2′-fluoroadenosine-3′-phosphate |
| Afs | 2′-fluoroadenosine-3′-phosphorothioate |
| As | adenosine-3′-phosphorothioate |
| C | cytidine-3′-phosphate |
| Cf | 2′-fluorocytidine-3′-phosphate |
| Cfs | 2′-fluorocytidine-3′-phosphorothioate |
| Cs | cytidine-3′-phosphorothioate |
| G | guanosine-3′-phosphate |
| Gf | 2′-fluoroguanosine-3′-phosphate |
| Gfs | 2′-fluoroguanosine-3′-phosphorothioate |
| Gs | guanosine-3′-phosphorothioate |
| T | 5′-methyluridine-3′-phosphate |
| Tf | 2′-fluoro-5-methyluridine-3′-phosphate |
| Tfs | 2′-fluoro-5-methyluridine-3′-phosphorothioate |
| Ts | 5-methyluridine-3′-phosphorothioate |
| U | Uridine-3′-phosphate |
| Uf | 2′-fluorouridine-3′-phosphate |
| Ufs | 2′-fluorouridine-3′-phosphorothioate |
| Us | uridine-3′-phosphorothioate |
| N | any nucleotide (G, A, C, T or U) |
| a | 2′-O-methyladenosine-3′-phosphate |
| as | 2′-O-methyladenosine-3′-phosphorothioate |
| c | 2′-O-methylcytidine-3′-phosphate |
| cs | 2′-O-methylcytidine-3′-phosphorothioate |
| g | 2′-O-methylguanosine-3′-phosphate |
| gs | 2′-O-methylguanosine-3′-phosphorothioate |
| t | 2′-O-methyl-5-methyluridine-3′-phosphate |
| ts | 2′-O-methyl-5-methyluridine-3′-phosphorothioate |
| u | 2′-O-methyluridine-3′-phosphate |
| us | 2′-O-methyluridine-3′-phosphorothioate |
| s | phosphorothioate linkage |
| dT | 2′-deoxythymidine-3′-phosphate |
| dTs | 2′-deoxythymidine-3′-phosphorothioate |
| L96 | N-[tris(GalNAc-alkyl)-amidodecanoyl)]-4- |
| | hydroxyprolinol Hyp-(GalNAc-alkyl)3 |
| 5′-VP | 5′-vinyl phosphate |

### In Vitro Screen

### Dual-Glo® Luciferase Assay

[0515] Cos7 cells (ATCC, Manassas, VA) were grown to near confluence at 37° C. in an atmosphere of 5% CO2 in DMEM (ATCC) supplemented with 10% FBS, before being released from the plate by trypsinization. siRNA and psiCHECK2-APCS plasmid transfection was carried out by adding 5 μl of siRNA duplexes and 5 μl of psiCHECK2-APCS plasmid per well along with 5 μl of Opti-MEM plus 0.1 μl of Lipofectamine 2000 per well (Invitrogen, Carlsbad CA. cat #13778-150) and then incubated at room temperature for 15 minutes. The mixture was then added to the cells which were re-suspended in 35 μl of fresh complete media. The transfected cells were incubated at 37° C. in an atmosphere of 5% CO2.

[0516] Forty-eight hours after the siRNAs and psiCHECK2-APCS plasmid were transfected; Firefly (transfection control) and Renilla (fused to ANGPTL4 target sequence) luciferase were measured. First, media was removed from cells. Then Firefly luciferase activity was measured by adding 20 μl of Dual-Glo® Luciferase Reagent equal to the culture medium volume to each well and mix. The mixture was incubated at room temperature for 30 minutes before luminescence (500 nm) was measured on a Spectramax (Molecular Devices) to detect the Firefly luciferase signal. Renilla luciferase activity was measured by adding 20 μl of room temperature of Dual-Glo® Stop & Glo® Reagent to each well and the plates were incubated for 10-15 minutes before luminescence was again measured to determine the Renilla luciferase signal. The Dual-Glo® Stop & Glo® Reagent, quenches the firefly luciferase signal and sustained luminescence for the Renilla luciferase reaction. siRNA activity was determined by normalizing the Renilla (HBV) signal to the Firefly (control) signal within each well. The magnitude of siRNA activity was then assessed relative to cells that were transfected with the same vector but were not treated with siRNA or were treated with a non-targeting siRNA. All transfections were done at n=2 or greater. Table 5A shows the results of a single dose screen of the indicated agents at 10 nm or 0.1 nm and Table 5B shows the results of a single dose screen of the indicated agents at 10 nM, 1 nM, or 0.1 nM. Data are expressed as percent of mRNA remaining relative to untreated Cos7 cells.

TABLE 3A
APCS iRNAs - Unmodified Sequences

| Duplex | | SEQ ID | | SEQ ID | Range |
|---|---|---|---|---|---|
| Name | Sense Sequence 5′ to 3′ | NO: | Antisnse Sequence 5′ to 3′ | NO: | IN NM-001639.3 |
| AD-75708 | ACUGCUUCUGCUAUAACAGCA | 13 | UGCUGUUAUAGCAGAAGCAGUGA | 97 | 61-83 |
| AD-75723 | UAUGAACAAGCCGCUGCUUUA | 14 | UAAAGCAGCGGCUUGUUCAUAUU | 98 | 94-116 |
| AD-75694 | CAGUGGGAAGGUGUUUGUAUA | 15 | UAUACAAACACCUUCCCACUGAG | 99 | 163-185 |
| AD-75692 | GUGUUUGUAUUUCCUAGAGAA | 16 | UUCUCUAGGAAAUACAAACACCU | 100 | 173-195 |
| AD-75664 | UCUGUUACUGAUCAUGUAAAA | 17 | UUUUACAUGAUCAGUAACAGAUU | 101 | 194-216 |
| AD-75664.2 | UCUGUUACUGAUCAUGUAAAA | 18 | UUUUACAUGAUCAGUAACAGAUU | 102 | 194-216 |
| AD-75679 | GUUACUGAUCAUGUAAACUUA | 19 | UAAGUUUACAUGAUCAGUAACAG | 103 | 197-219 |
| AD-75659 | UACUGAUCAUGUAAACUUGAA | 20 | UUCAAGUUUACAUGAUCAGUAAC | 104 | 199-221 |
| AD-75662 | AUCAUGUAAACUUGAUCACAA | 21 | UUGUGAUCAAGUUUACAUGAUCA | 105 | 204-226 |
| AD-75680 | UCAUGUAAACUUGAUCACACA | 22 | UGUGUGAUCAAGUUUACAUGAUC | 106 | 205-227 |
| AD-75687 | CUCUACAGAACUUUACCUUGA | 23 | UCAAGGUAAAGUUCUGUAGAGGC | 107 | 237-259 |
| AD-75657 | ACUUUACCUUGUGUUUUCGAA | 24 | UUCGAAAACACAAGGUAAAGUUC | 108 | 246-268 |
| AD-75699 | GUUUUCGAGCCUAUAGUGAUA | 25 | UAUCACUAUAGGCUCGAAAACAC | 109 | 258-280 |
| AD-75727 | GAAACUGAUCAUGUGAAGCUA | 26 | UAGCUUCACAUGAUCAGUUUCAG | 110 | 271-293 |
| AD-75731 | ACCUCUGCAGAAUUUUACACA | 27 | UGUGUAAAAUUCUGCAGAGGUUU | 111 | 309-331 |
| AD-75728 | GCAGAAUUUUACACUGUGUUA | 28 | UAACACAGUGUAAAAUUCUGCAG | 112 | 315-337 |
| AD-75737 | CAGAAUUUUACACUGUGUUUA | 29 | UAAACACAGUGUAAAAUUCUGCA | 113 | 316-338 |
| AD-75696 | UAAUGAGCUACUAGUUUAUAA | 30 | UUAUAAACUAGUAGCUCAUUAUC | 114 | 325-347 |
| AD-75718 | AAUGAGCUACUAGUUUAUAAA | 31 | UUUAUAAACUAGUAGCUCAUUAU | 115 | 326-348 |
| AD-75676 | AUGAGCUACUAGUUUAUAAAA | 32 | UUUUAUAAACUAGUAGCUCAUUA | 116 | 327-349 |
| AD-75663 | UGAGCUACUAGUUUAUAAAGA | 33 | UCUUUAUAAACUAGUAGCUCAUU | 117 | 328-350 |
| AD-75669 | GAGCUACUAGUUUAUAAAGAA | 34 | UUCUUUAUAAACUAGUAGCUCAU | 118 | 329-351 |
| AD-75666 | AGCUACUAGUUUAUAAAGAAA | 35 | UUUCUUUAUAAACUAGUAGCUCA | 119 | 330-352 |
| AD-75735 | UGUUUCCGAACCUACAGUGAA | 36 | UUCACUGUAGGUUCGGAAACACA | 120 | 331-353 |
| AD-75686 | CUACUAGUUUAUAAAGAAAGA | 37 | UCUUUCUUUAUAAACUAGUAGCU | 121 | 332-354 |
| AD-75736 | CCGAACCUACAGUGACCUUUA | 38 | UAAAGGUCACUGUAGGUUCGGAA | 122 | 336-358 |
| AD-75674 | GUUUAUAAAGAAAGAGUUGGA | 39 | UCCAACUCUUUCUUUAUAAACUA | 123 | 338-360 |
| AD-75717 | UAAAGAAAGAGUUGGAGAGUA | 40 | UACUCUCCAACUCUUUCUUUAUA | 124 | 343-365 |
| AD-75706 | GUUGGAGAGUAUAGUCUAUAA | 41 | UUAUAGACUAUACUCUCCAACUC | 125 | 353-375 |
| AD-75719 | AGUAUAGUCUAUACAUUGGAA | 42 | UUCCAAUGUAUAGACUAUACUCU | 126 | 360-382 |
| AD-75688 | UAGUCUAUACAUUGGAAGACA | 43 | UGUCUUCCAAUGUAUAGACUAUA | 127 | 364-386 |
| AD-75734 | AGAGUCUUUUCUCCUACAGUA | 44 | UACUGUAGGAGAAAAGACUCUGA | 128 | 365-387 |
| AD-75724 | UACAUUGGAAGACACAAAGUA | 45 | UACUUUGUGUCUUCCAAUGUAUA | 129 | 371-393 |
| AD-75711 | UUGGAAGACACAAAGUUACAA | 46 | UUGUAACUUUGUGUCUUCCAAUG | 130 | 375-397 |
| AD-75703 | AGACACAAAGUUACAUCCAAA | 47 | UUUGGAUGUAACUUUGUGUCUUC | 131 | 380-402 |
| AD-75721 | ACAAAGUUACAUCCAAAGUUA | 48 | UAACUUUGGAUGUAACUUUGUGU | 132 | 384-406 |
| AD-75712 | AAGUUACAUCCAAAGUUAUCA | 49 | UGAUAACUUUGGAUGUAACUUUG | 133 | 387-409 |
| AD-75697 | UACAUCCAAAGUUAUCGAAAA | 50 | UUUUCGAUAACUUUGGAUGUAAC | 134 | 391-413 |
| AD-75726 | UCCAAAGUUAUCGAAAAGUUA | 51 | UAACUUUUCGAUAACUUUGGAUG | 135 | 395-417 |
| AD-75730 | GAGACAAUGAGCUACUAAUUA | 52 | UAAUUAGUAGCUCAUUGUCUCUG | 136 | 395-417 |
| AD-75732 | AGACAAUGAGCUACUAAUUUA | 53 | UAAAUUAGUAGCUCAUUGUCUCU | 137 | 396-418 |
| AD-75733 | AAUGAGCUACUAAUUUAUAAA | 54 | UUUAUAAAUUAGUAGCUCAUUGU | 138 | 400-422 |
| AD-75729 | GAGCUACUAAUUUAUAAAGAA | 55 | UUCUUUAUAAAUUAGUAGCUCAU | 139 | 403-425 |
| AD-75685 | CUCAUCAGGUAUUGCUGAAUA | 56 | UAUUCAGCAAUACCUGAUGAGGA | 140 | 451-473 |
| AD-75673 | UCAGGUAUUGCUGAAUUUUGA | 57 | UCAAAAUUCAGCAAUACCUGAUG | 141 | 455-477 |
| AD-75691 | GUAUUGCUGAAUUUUGGAUCA | 58 | UGAUCCAAAAUUCAGCAAUACCU | 142 | 459-481 |
| AD-75670 | GAAGCUCAGCCCAAGAUUGUA | 59 | UACAAUCUUGGGCUGAGCUUCUA | 143 | 527-549 |
| AD-75739 | GCAUUGUUGAAUUUUGGGUCA | 60 | UGACCCAAAAUUCAACAAUGCCA | 144 | 533-555 |
| AD-75738 | UUGUUGAAUUUUGGGUCAAUA | 61 | UAUUGACCCAAAAUUCAACAAUG | 145 | 536-558 |
| AD-75722 | AUUCCUAUGGGGGCAAGUUUA | 62 | UAAACUUGCCCCCAUAGGAAUCC | 146 | 564-586 |
| AD-75714 | AAAAUAUCCUGUCUGCCUAUA | 63 | UAUAGGCAGACAGGAUAUUUUCU | 147 | 651-673 |
| AD-75681 | AAAUAUCCUGUCUGCCUAUCA | 64 | UGAUAGGCAGACAGGAUAUUUUC | 148 | 652-674 |
| AD-75668 | AAUAUCCUGUCUGCCUAUCAA | 65 | UUGAUAGGCAGACAGGAUAUUUU | 149 | 653-675 |
| AD-75693 | CAGGCUCUGAACUAUGAAAUA | 66 | UAUUUCAUAGUUCAGAGCCUGCC | 150 | 707-729 |
| AD-75677 | AGGCUCUGAACUAUGAAAUCA | 67 | UGAUUUCAUAGUUCAGAGCCUGC | 151 | 708-730 |
| AD-75690 | GGCUCUGAACUAUGAAAUCAA | 68 | UUGAUUUCAUAGUUCAGAGCCUG | 152 | 709-731 |
| AD-75716 | GCUCUGAACUAUGAAAUCAGA | 69 | UCUGAUUUCAUAGUUCAGAGCCU | 153 | 710-732 |
| AD-75682 | GAGGAUAUGUCAUCAUCAAAA | 70 | UUUUGAUGAUGACAUAUCCUCUG | 154 | 729-751 |
| AD-75720 | UAUGUCAUCAUCAAACCCUUA | 71 | UAAGGGUUUGAUGAUGACAUAUC | 155 | 734-756 |
| AD-75725 | CAUCAUCAAACCCUUGGUGUA | 72 | UACACCAAGGGUUUGAUGAUGAC | 156 | 739-761 |
| AD-75695 | AACGAGAGCACUUGAAAAUGA | 73 | UCAUUUUCAAGUGCUCUCGUUGA | 157 | 778-800 |
| AD-75665 | CGAGAGCACUUGAAAAUGAAA | 74 | UUUCAUUUUCAAGUGCUCUCGUU | 158 | 780-802 |
| AD-75661 | AGCACUUGAAAAUGAAAUGAA | 75 | UUCAUUUCAUUUUCAAGUGCUCU | 159 | 784-806 |
| AD-75658 | GCACUUGAAAAUGAAAUGACA | 76 | UGUCAUUUCAUUUUCAAGUGCUC | 160 | 785-807 |
| AD-75700 | AAAUGAAAUGACUGUCUAAGA | 77 | UCUUAGACAGUCAUUUCAUUUUC | 161 | 793-815 |
| AD-75698 | AAUGAAAUGACUGUCUAAGAA | 78 | UUCUUAGACAGUCAUUUCAUUUU | 162 | 794-816 |
| AD-75672 | UGAAAUGACUGUCUAAGAGAA | 79 | UUCUCUUAGACAGUCAUUUCAUU | 163 | 796-818 |
| AD-75684 | GAAAUGACUGUCUAAGAGAUA | 80 | UAUCUCUUAGACAGUCAUUUCAU | 164 | 797-819 |
| AD-75667 | AAAUGACUGUCUAAGAGAUCA | 81 | UGAUCUCUUAGACAGUCAUUUCA | 165 | 798-820 |
| AD-75678 | CAACUGGAUACUAGAUCUUAA | 82 | UUAAGAUCUAGUAUCCAGUUGCU | 166 | 827-849 |
| AD-75660 | GCAGCUCUUUCUUCUUUGAAA | 83 | UUUCAAAGAAGAAAGAGCUGCAG | 167 | 852-874 |
| AD-75701 | CUCUUUCUUCUUUGAAUUUCA | 84 | UGAAAUUCAAAGAAGAAAGAGCU | 168 | 856-878 |
| AD-75707 | CUUUCUUCUUUGAAUUUCCUA | 85 | UAGGAAAUUCAAAGAAGAAAGAG | 169 | 858-880 |
| AD-75675 | CUUUGAAUUUCCUAUCUGUAA | 86 | UUACAGAUAGGAAAUUCAAAGAA | 170 | 865-887 |
| AD-75671 | UUUGAAUUUCCUAUCUGUAUA | 87 | UAUACAGAUAGGAAAUUCAAAGA | 171 | 866-888 |
| AD-75683 | UGAAUUUCCUAUCUGUAUGUA | 88 | UACAUACAGAUAGGAAAUUCAAA | 172 | 868-890 |
| AD-75689 | AAUUUCCUAUCUGUAUGUCUA | 89 | UAGACAUACAGAUAGGAAAUUCA | 173 | 870-892 |
| AD-75715 | AUCUGUAUGUCUGCCUAAUUA | 90 | UAAUUAGGCAGACAUACAGAUAG | 174 | 878-900 |
| AD-75705 | UGUAUGUCUGCCUAAUUAAAA | 91 | UUUUAAUUAGGCAGACAUACAGA | 175 | 881-903 |
| AD-75704 | GUAUGUCUGCCUAAUUAAAAA | 92 | UUUUUAAUUAGGCAGACAUACAG | 176 | 882-904 |
| AD-75713 | UAUGUCUGCCUAAUUAAAAAA | 93 | UUUUUUAAUUAGGCAGACAUACA | 177 | 883-905 |
| AD-75702 | UGUCUGCCUAAUUAAAAAAAA | 94 | UUUUUUUUAAUUAGGCAGACAUA | 178 | 885-907 |
| AD-75709 | UUGUAUUAUGCUACCUGCAAA | 95 | UUUGCAGGUAGCAUAAUACAAUA | 179 | 911-933 |
| AD-75710 | UUAUGCUACCUGCAAAAAAAA | 96 | UUUUUUUUGCAGGUAGCAUAAUA | 180 | 916-938 |

TABLE 3B
APCS iRNAs - Unmodified Sequences

| Duplex | Sense Sequence 5′-3′ | | SEQ ID | Range in |
|---|---|---|---|---|
| Name | Antisense Sequence 5′-3′ | Range in NM_011318.2 | NO | NM_011318.2 |
| AD-197584.1 | CAAUGAGCUACUAAUUUAUAA | NM_011318.2_401-421_s | | 401-421_s |
| | UUAUAAAUUAGUAGCUCAUUGUC | NM_011318.2_399-421_as | | 399-421_as |
| AD-197510.1 | AUUUUACACUGUGUUUCCGAA | NM_011318.2_322-342_s | | 322-342_s |
| | UUCGGAAACACAGUGUAAAAUUC | NM_011318.2_320-342_as | | 320-342_as |
| AD-197583.1 | ACAAUGAGCUACUAAUUUAUA | NM_011318.2_400-420_s | | 400-420_s |
| | UAUAAAUUAGUAGCUCAUUGUCU | NM_011318.2_398-420_as | | 398-420_as |
| AD-75728.3 | GCAGAAUUUUACACUGUGUUA | NM_011318.2_319-338_s | | 319-338_s |
| | UAACACAGUGUAAAAUUCUGCAG | NM_011318.2_317-338_as | | 317-338_as |
| AD-197508.1 | GAAUUUUACACUGUGUUUCCA | NM_011318.2_320-340_G21A_s | | 320-340_G21A_s |
| | UGGAAACACAGUGUAAAAUUCUG | NM_011318.2_318-340_C1U_as | | 318-340_C1U_as |
| AD-75737.3 | CAGAAUUUUACACUGUGUUUA | NM_011318.2_320-339_C21A_s | | 320-339_C21A_s |
| | UAAACACAGUGUAAAAUUCUGCA | NM_011318.2_318-339_C21A_as | | 318-339_C21A_as |
| AD-197550.1 | CUCAGAGUCUUUUCUCCUACA | NM_011318.2_364-384_s | | 364-384_s |
| | UGUAGGAGAAAAGACUCUGAGAG | NM_011318.2_362-384_as | | 362-384_as |
| AD-197582.1 | GACAAUGAGCUACUAAUUUAA | NM_011318.2_399-419_s | | 399-419_s |
| | UUAAAUUAGUAGCUCAUUGUCUC | NM_011318.2_397-419_as | | 397-419_as |
| AD-75732.3 | AGACAAUGAGCUACUAAUUUA | NM_011318.2_400-419_s | | 400-419_s |
| | UAAAUUAGUAGCUCAUUGUCUCU | NM_011318.2_398-419_as | | 398-419_as |
| AD-197726.1 | AUGGAAAGCCUUGGGUAAAAA | NM_011318.2_556-576_s | | 556-576_s |
| | UUUUUACCCAAGGCUUUCCAUUG | NM_011318.2_554-576_as | | 554-576_as |
| AD-197544.1 | CCCGCUCUCAGAGUCUUUUCA | NM_011318.2_358-378_s | | 358-378_s |
| | UGAAAAGACUCUGAGAGCGGGAA | NM_011318.2_356-378_as | | 356-378_as |
| AD-197551.1 | UCAGAGUCUUUUCUCCUACAA | NM_011318.2_365-385_G21A_s | | 365-385_G21A_s |
| | UUGUAGGAGAAAAGACUCUGAGA | NM_011318.2_363-385_C1U_as | | 363-385_C1U_as |
| AD-75730.2 | GAGACAAUGAGCUACUAAUUA | NM_011318.2_399-418_s | | 399-418_s |
| | UAAUUAGUAGCUCAUUGUCUCUG | NM_011318.2_397-418_as | | 397-418_as |
| AD-197410.1 | UUCACCAGCCUUCUUUCAGAA | NM_011318.2_198-218_s | | 198-218_s |
| | UUCUGAAAGAAGGCUGGUGAAGA | NM_011318.2_196-218_as | | 196-218_as |
| AD-197556.1 | UCUUUUCUCCUACAGUGUCAA | NM_011318.2_371-391_s | | 371-391_s |
| | UUGACACUGUAGGAGAAAAGACU | NM_011318.2_369-391_as | | 369-391_as |
| AD-197534.1 | AGUGACCUUUCCCGCUCUCAA | NM_011318.2_348-368_G21A_s | | 348-368_G21A_s |
| | UUGAGAGCGGGAAAGGUCACUGU | NM_011318.2_346-368_C1U_as | | 346-368_C1U_as |
| AD-75734.2 | AGAGUCUUUUCUCCUACAGUA | NM_011318.2_369-388_G21A_s | | 369-388_G21A_s |
| | UACUGUAGGAGAAAAGACUCUGA | NM_011318.2_367-388_G21A_as | | 367-388_G21A_as |
| AD-197503.1 | CUCUGCAGAAUUUUACACUGA | NM_011318.2_313-333_s | | 313-333_s |
| | UCAGUGUAAAAUUCUGCAGAGGU | NM_011318.2_311-333_as | | 311-333_as |
| AD-197406.1 | UGUCUUCACCAGCCUUCUUUA | NM_011318.2_194-214_C21A_s | | 194-214_C21A_s |
| | UAAAGAAGGCUGGUGAAGACAAA | NM_011318.2_192-214_G1U_as | | 192-214_G1U_as |
| AD-197416.1 | AGCCUUCUUUCAGAAGCCUUA | NM_011318.2_204-224_s | | 204-224_s |
| | UAAGGCUUCUGAAAGAAGGCUGG | NM_011318.2_202-224_as | | 202-224_as |
| AD-197725.1 | AAUGGAAAGCCUUGGGUAAAA | NM_011318.2_555-575_s | | 555-575_s |
| | UUUUACCCAAGGCUUUCCAUUGA | NM_011318.2_553-575_as | | 553-575_as |
| AD-197546.1 | CGCUCUCAGAGUCUUUUCUCA | NM_011318.2_360-380_C21A_s | | 360-380_C21A_s |
| | UGAGAAAAGACUCUGAGAGCGGG | NM_011318.2_358-380_G1U_as | | 358-380_G1U_as |
| AD-197724.1 | CAAUGGAAAGCCUUGGGUAAA | NM_011318.2_554-574_s | | 554-574_s |
| | UUUACCCAAGGCUUUCCAUUGAC | NM_011318.2_552-574_as | | 552-574_as |
| AD-197408.1 | UCUUCACCAGCCUUCUUUCAA | NM_011318.2_196-216_G21A_s | | 196-216_G21A_s |
| | UUGAAAGAAGGCUGGUGAAGACA | NM_011318.2_194-216_C1U_as | | 194-216_C1U_as |
| AD-197548.1 | CUCUCAGAGUCUUUUCUCCUA | NM_011318.2_362-382_s | | 362-382_s |
| | UAGGAGAAAAGACUCUGAGAGCG | NM_011318.2_360-382_as | | 360-382_as |
| AD-197565.1 | CAGAGACAAUGAGCUACUAAA | NM_011318.2_397-416_s | | 397-416_s |
| | UUUAGUAGCUCAUUGUCUCUGCC | NM_011318.2_395-416_as | | 395-416_as |
| AD-197581.1 | AGAGACAAUGAGCUACUAAUA | NM_011318.2_396-416_s | | 396-416_s |
| | UAUUAGUAGCUCAUUGUCUCUGC | NM_011318.2_394-416_as | | 394-416_as |
| AD-197552.1 | CAGAGUCUUUUCUCCUACAGA | NM_011318.2_366-386_s | | 366-386_s |
| | UCUGUAGGAGAAAAGACUCUGAG | NM_011318.2_364-386_as | | 364-386_as |
| AD-197549.1 | UCUCAGAGUCUUUUCUCCUAA | NM_011318.2_363-383_C21A_s | | 363-383_C21A_s |
| | UUAGGAGAAAAGACUCUGAGAGC | NM_011318.2_361-383_G1U_as | | 361-383_G1U_as |
| AD-197529.1 | CCUACAGUGACCUUUCCCGCA | NM_011318.2_343-363_s | | 343-363_s |
| | UGCGGGAAAGGUCACUGUAGGUU | NM_011318.2_341-363_as | | 341-363_as |
| AD-197417.1 | GCCUUCUUUCAGAAGCCUUUA | NM_011318.2_205-225_s | | 205-225_s |
| | UAAAGGCUUCUGAAAGAAGGCUG | NM_011318.2_203-225_as | | 203-225_as |
| AD-197543.1 | UCCCGCUCUCAGAGUCUUUUA | NM_011318.2_357-377_C21A_s | | 357-377_C21A_s |
| | UAAAAGACUCUGAGAGCGGGAAA | NM_011318.2_355-377_G1U_as | | 355-377_G1U_as |
| AD-197555.1 | GUCUUUUCUCCUACAGUGUCA | NM_011318.2_370-390_s | | 370-390_s |
| | UGACACUGUAGGAGAAAAGACUC | NM_011318.2_368-390_as | | 368-390_as |
| AD-197530.1 | CUACAGUGACCUUUCCCGCUA | NM_011318.2_344-364_C21A_s | | 344-364_C21A_s |
| | UAGCGGGAAAGGUCACUGUAGGU | NM_011318.2_342-364_G1U_as | | 342-364_G1U_as |
| AD-197554.1 | AGUCUUUUCUCCUACAGUGUA | NM_011318.2_369-389_C21A_s | | 369-389_C21A_s |
| | UACACUGUAGGAGAAAAGACUCU | NM_011318.2_367-389_G1U_as | | 367-389_G1U_as |
| AD-197532.1 | ACAGUGACCUUUCCCGCUCUA | NM_011318.2_346-366_C21A_s | | 346-366_C21A_s |
| | UAGAGCGGGAAAGGUCACUGUAG | NM_011318.2_344-366_G1U_as | | 344-366_G1U_as |
| AD-197412.1 | CACCAGCCUUCUUUCAGAAGA | NM_011318.2_200-220_C21A_s | | 200-220_C21A_s |
| | UCUUCUGAAAGAAGGCUGGUGAA | NM_011318.2_198-220_G1U_as | | 198-220_G1U_as |
| AD-197713.1 | GAAUUUUGGGUCAAUGGAAAA | NM_011318.2_543-563_s | | 543-563_s |
| | UUUUCCAUUGACCCAAAAUUCAA | NM_011318.2_541-563_as | | 541-563_as |
| AD-197411.1 | UCACCAGCCUUCUUUCAGAAA | NM_011318.2_199-219_G21A_s | | 199-219_G21A_s |
| | UUUCUGAAAGAAGGCUGGUGAAG | NM_011318.2_197-219_C1U_as | | 197-219_C1U_as |
| AD-197557.1 | CUUUUCUCCUACAGUGUCAAA | NM_011318.2_372-392_G21A_s | | 372-392_G21A_s |
| | UUUGACACUGUAGGAGAAAAGAC | NM_011318.2_370-392_C1U_as | | 370-392_C1U_as |
| AD-197528.1 | ACCUACAGUGACCUUUCCCGA | NM_011318.2_342-362_C21A_s | | 342-362_C21A_s |
| | UCGGGAAAGGUCACUGUAGGUUC | NM_011318.2_340-362_G1U_as | | 340-362_G1U_as |
| AD-197631.1 | UCAAAAGUCACAGUCCGUGGA | NM_011318.2_459-479_s | | 459-479_s |
| | UCCACGGACUGUGACUUUUGAUU | NM_011318.2_457-479_as | | 457-479_as |
| AD-197541.1 | UUUCCCGCUCUCAGAGUCUUA | NM_011318.2_355-375_s | | 355-375_s |
| | UAAGACUCUGAGAGCGGGAAAGG | NM_011318.2_353-375_as | | 353-375_as |
| AD-197533.1 | CAGUGACCUUUCCCGCUCUCA | NM_011318.2_347-367_s | | 347-367_s |
| | UGAGAGCGGGAAAGGUCACUGUA | NM_011318.2_345-367_as | | 345-367_as |
| AD-197632.1 | CAAAAGUCACAGUCCGUGGUA | NM_011318.2_460-480_s | | 460-480_s |
| | UACCACGGACUGUGACUUUUGAU | NM_011318.2_458-480_as | | 458-480_as |
| AD-197542.1 | UUCCCGCUCUCAGAGUCUUUA | NM_011318.2_356-376_s | | 356-376_s |
| | UAAAGACUCUGAGAGCGGGAAAG | NM_011318.2_354-376_as | | 354-376_as |
| AD-197629.1 | AAUCAAAAGUCACAGUCCGUA | NM_011318.2_457-477_G21A_s | | 457-477_G21A_s |
| | UACGGACUGUGACUUUUGAUUGU | NM_011318.2_455-477_C1U_as | | 455-477_C1U_as |

TABLE 4A
APCS iRNAs - Modified Sequences

| Duplex | | | | | | |
|---|---|---|---|---|---|---|
| Name | Sense Sequence 5′ to 3′ | SEQ ID NO | Antisense Sequence 5′ to 3′ | SEQ ID NO | mRNA target sequence | SEQ ID NO |
| AD-75708 | ascsugcuUfcUfGfCfuauaacagcaL96 | 181 | VPusGfscugUfuAfUfagcaGfaAfgcagusgsa | 265 | UCACUGCUUCUGCUAUAACAGCC | 349 |
| AD-75723 | usasugaaCfaAfGfCfcgcugcuuuaL96 | 182 | VPusAfsaagCfaGfCfggcuUfgUfucauasusu | 266 | AAUAUGAACAAGCCGCUGCUUUG | 350 |
| AD-75694 | csasguggGfaAfGfGfuguuuguauaL96 | 183 | VPusAfsuacAfaAfCfaccuUfcCfcacugsasg | 267 | CUCAGUGGGAAGGUGUUUGUAUU | 351 |
| AD-75692 | gsusguuuGfuAfUfUfuccuagagaaL96 | 184 | VPusUfscucUfaGfGfaaauAfcAfaacacscsu | 268 | AGGUGUUUGUAUUUCCUAGAGAA | 352 |
| AD-75664 | uscsuguuAfcUfGfAfucauguaaaaL96 | 185 | VPusUfsuuaCfaUfGfaucaGfuAfacagasusu | 269 | AAUCUGUUACUGAUCAUGUAAAC | 353 |
| AD-75664.2 | uscsuguuAfcUfGfAfucauguaaaaL96 | 186 | VPusUfsuuaCfaUfGfaucaGfuAfacagasusu | 270 | AAUCUGUUACUGAUCAUGUAAAC | 354 |
| AD-75679 | gsusuacuGfaUfCfAfuguaaacuuaL96 | 187 | VPusAfsaguUfuAfCfaugaUfcAfguaacsasg | 271 | CUGUUACUGAUCAUGUAAACUUG | 355 |
| AD-75659 | usascugaUfcAfUfGfuaaacuugaaL96 | 188 | VPusUfscaaGfuUfUfacauGfaUfcaguasasc | 272 | GUUACUGAUCAUGUAAACUUGAU | 356 |
| AD-75662 | asuscaugUfaAfAfCfuugaucacaaL96 | 189 | VPusUfsgugAfuCfAfaguuUfaCfaugauscsa | 273 | UGAUCAUGUAAACUUGAUCACAC | 357 |
| AD-75680 | uscsauguAfaAfCfUfugaucacacaL96 | 190 | VPusGfsuguGfaUfCfaaguUfuAfcaugasusc | 274 | GAUCAUGUAAACUUGAUCACACC | 358 |
| AD-75687 | csuscuacAfgAfAfCfuuuaccuugaL96 | 191 | VPusCfsaagGfuAfAfaguuCfuGfuagagsgsc | 275 | GCCUCUACAGAACUUUACCUUGU | 359 |
| AD-75657 | ascsuuuaCfcUfUfGfuguuuucgaaL96 | 192 | VPusUfscgaAfaAfCfacaaGfgUfaaagususc | 276 | GAACUUUACCUUGUGUUUUCGAG | 360 |
| AD-75699 | gsusuuucGfaGfCfCfuauagugauaL96 | 193 | VPusAfsucaCfuAfUfaggcUfcGfaaaacsasc | 277 | GUGUUUUCGAGCCUAUAGUGAUC | 361 |
| AD-75727 | gsasaacuGfaUfCfAfugugaagcuaL96 | 194 | VPusAfsgcuUfcAfCfaugaUfcAfguuucsasg | 278 | CUGAAACUGAUCAUGUGAAGCUG | 362 |
| AD-75731 | ascscucuGfcAfGfAfauuuuacacaL96 | 195 | VPusGfsuguAfaAfAfuucuGfcAfgaggususu | 279 | AAACCUCUGCAGAAUUUUACACU | 363 |
| AD-75728 | gscsagaaUfuUfUfAfcacuguguuaL96 | 196 | VPusAfsacaCfaGfUfguaaAfaUfucugcsasg | 280 | CUGCAGAAUUUUACACUGUGUUU | 364 |
| AD-75737 | csasgaauUfuUfAfCfacuguguuuaL96 | 197 | VPusAfsaacAfcAfGfuguaAfaAfuucugscsa | 281 | UGCAGAAUUUUACACUGUGUUUC | 365 |
| AD-75696 | usasaugaGfcUfAfCfuaguuuauaaL96 | 198 | VPusUfsauaAfaCfUfaguaGfcUfcauuasusc | 282 | GAUAAUGAGCUACUAGUUUAUAA | 366 |
| AD-75718 | asasugagCfuAfCfUfaguuuauaaaL96 | 199 | VPusUfsuauAfaAfCfuaguAfgCfucauusasu | 283 | AUAAUGAGCUACUAGUUUAUAAA | 367 |
| AD-75676 | asusgagcUfaCfUfAfguuuauaaaaL96 | 200 | VPusUfsuuaUfaAfAfcuagUfaGfcucaususa | 284 | UAAUGAGCUACUAGUUUAUAAAG | 368 |
| AD-75663 | usgsagcuAfcUfAfGfuuuauaaagaL96 | 201 | VPusCfsuuuAfuAfAfacuaGfuAfgcucasusu | 285 | AAUGAGCUACUAGUUUAUAAAGA | 369 |
| AD-75669 | gsasgcuaCfuAfGfUfuuauaaagaaL96 | 202 | VPusUfscuuUfaUfAfaacuAfgUfagcucsasu | 286 | AUGAGCUACUAGUUUAUAAAGAA | 370 |
| AD-75666 | asgscuacUfaGfUfUfuauaaagaaaL96 | 203 | VPusUfsucuUfuAfUfaaacUfaGfuagcuscsa | 287 | UGAGCUACUAGUUUAUAAAGAAA | 371 |
| AD-75735 | usgsuuucCfgAfAfCfcuacagugaaL96 | 204 | VPusUfscacUfgUfAfgguuCfgGfaaacascsa | 288 | UGUGUUUCCGAACCUACAGUGAC | 372 |
| AD-75686 | csusacuaGfuUfUfAfuaaagaaagaL96 | 205 | VPusCfsuuuCfuUfUfauaaAfcUfaguagscsu | 289 | AGCUACUAGUUUAUAAAGAAAGA | 373 |
| AD-75736 | cscsgaacCfuAfCfAfgugaccuuuaL96 | 206 | VPusAfsaagGfuCfAfcuguAfgGfuucggsasa | 290 | UUCCGAACCUACAGUGACCUUUC | 374 |
| AD-75674 | gsusuuauAfaAfGfAfaagaguuggaL96 | 207 | VPusCfscaaCfuCfUfuucuUfuAfuaaacsusa | 291 | UAGUUUAUAAAGAAAGAGUUGGA | 375 |
| AD-75717 | usasaagaAfaGfAfGfuuggagaguaL96 | 208 | VPusAfscucUfcCfAfacucUfuUfcuuuasusa | 292 | UAUAAAGAAAGAGUUGGAGAGUA | 376 |
| AD-75706 | gsusuggaGfaGfUfAfuagucuauaaL96 | 209 | VPusUfsauaGfaCfUfauacUfcUfccaacsusc | 293 | GAGUUGGAGAGUAUAGUCUAUAC | 377 |
| AD-75719 | asgsuauaGfuCfUfAfuacauuggaaL96 | 210 | VPusUfsccaAfuGfUfauagAfcUfauacuscsu | 294 | AGAGUAUAGUCUAUACAUUGGAA | 378 |
| AD-75688 | usasgucuAfuAfCfAfuuggaagacaL96 | 211 | VPusGfsucuUfcCfAfauguAfuAfgacuasusa | 295 | UAUAGUCUAUACAUUGGAAGACA | 379 |
| AD-75734 | asgsagucUfuUfUfCfuccuacaguaL96 | 212 | VPusAfscugUfaGfGfagaaAfaGfacucusgsa | 296 | UCAGAGUCUUUUCUCCUACAGUG | 380 |
| AD-75724 | usascauuGfgAfAfGfacacaaaguaL96 | 213 | VPusAfscuuUfgUfGfucuuCfcAfauguasusa | 297 | UAUACAUUGGAAGACACAAAGUU | 381 |
| AD-75711 | ususggaaGfaCfAfCfaaaguuacaaL96 | 214 | VPusUfsguaAfcUfUfugugUfcUfuccaasusg | 298 | CAUUGGAAGACACAAAGUUACAU | 382 |
| AD-75703 | asgsacacAfaAfGfUfuacauccaaaL96 | 215 | VPusUfsuggAfuGfUfaacuUfuGfugucususc | 299 | GAAGACACAAAGUUACAUCCAAA | 383 |
| AD-75721 | ascsaaagUfuAfCfAfuccaaaguuaL96 | 216 | VPusAfsacuUfuGfGfauguAfaCfuuugusgsu | 300 | ACACAAAGUUACAUCCAAAGUUA | 384 |
| AD-75712 | asasguuaCfaUfCfCfaaaguuaucaL96 | 217 | VPusGfsauaAfcUfUfuggaUfgUfaacuususg | 301 | CAAAGUUACAUCCAAAGUUAUCG | 385 |
| AD-75697 | usascaucCfaAfAfGfuuaucgaaaaL96 | 218 | VPusUfsuucGfaUfAfacuuUfgGfauguasasc | 302 | GUUACAUCCAAAGUUAUCGAAAA | 386 |
| AD-75726 | uscscaaaGfuUfAfUfcgaaaaguuaL96 | 219 | VPusAfsacuUfuUfCfgauaAfcUfuuggasusg | 303 | CAUCCAAAGUUAUCGAAAAGUUC | 387 |
| AD-75730 | gsasgacaAfuGfAfGfcuacuaauuaL96 | 220 | VPusAfsauuAfgUfAfgcucAfuUfgucucsusg | 304 | CAGAGACAAUGAGCUACUAAUUU | 388 |
| AD-75732 | asgsacaaUfgAfGfCfuacuaauuuaL96 | 221 | VPusAfsaauUfaGfUfagcuCfaUfugucuscsu | 305 | AGAGACAAUGAGCUACUAAUUUA | 389 |
| AD-75733 | asasugagCfuAfCfUfaauuuauaaaL96 | 222 | VPusUfsuauAfaAfUfuaguAfgCfucauusgsu | 306 | ACAAUGAGCUACUAAUUUAUAAA | 390 |
| AD-75729 | gsasgcuaCfuAfAfUfuuauaaagaaL96 | 223 | VPusUfscuuUfaUfAfaauuAfgUfagcucsasu | 307 | AUGAGCUACUAAUUUAUAAAGAA | 391 |
| AD-75685 | csuscaucAfgGfUfAfuugcugaauaL96 | 224 | VPusAfsuucAfgCfAfauacCfuGfaugagsgsa | 308 | UCCUCAUCAGGUAUUGCUGAAUU | 392 |
| AD-75673 | uscsagguAfuUfGfCfugaauuuugaL96 | 225 | VPusCfsaaaAfuUfCfagcaAfuAfccugasusg | 309 | CAUCAGGUAUUGCUGAAUUUUGG | 393 |
| AD-75691 | gsusauugCfuGfAfAfuuuuggaucaL96 | 226 | VPusGfsaucCfaAfAfauucAfgCfaauacscsu | 310 | AGGUAUUGCUGAAUUUUGGAUCA | 394 |
| AD-75670 | gsasagcuCfaGfCfCfcaagauuguaL96 | 227 | VPusAfscaaUfcUfUfgggcUfgAfgcuucsusa | 311 | UAGAAGCUCAGCCCAAGAUUGUC | 395 |
| AD-75739 | gscsauugUfuGfAfAfuuuugggucaL96 | 228 | VPusGfsaccCfaAfAfauucAfaCfaaugcscsa | 312 | UGGCAUUGUUGAAUUUUGGGUCA | 396 |
| AD-75738 | ususguugAfaUfUfUfugggucaauaL96 | 229 | VPusAfsuugAfcCfCfaaaaUfuCfaacaasusg | 313 | CAUUGUUGAAUUUUGGGUCAAUG | 397 |
| AD-75722 | asusuccuAfuGfGfGfggcaaguuuaL96 | 230 | VPusAfsaacUfuGfCfccccAfuAfggaauscsc | 314 | GGAUUCCUAUGGGGGCAAGUUUG | 398 |
| AD-75714 | asasaauaUfcCfUfGfucugccuauaL96 | 231 | VPusAfsuagGfcAfGfacagGfaUfauuuuscsu | 315 | AGAAAAUAUCCUGUCUGCCUAUC | 399 |
| AD-75681 | asasauauCfcUfGfUfcugccuaucaL96 | 232 | VPusGfsauaGfgCfAfgacaGfgAfuauuususc | 316 | GAAAAUAUCCUGUCUGCCUAUCA | 400 |
| AD-75668 | asasuaucCfuGfUfCfugccuaucaaL96 | 233 | VPusUfsgauAfgGfCfagacAfgGfauauususu | 317 | AAAAUAUCCUGUCUGCCUAUCAG | 401 |
| AD-75693 | csasggcuCfuGfAfAfcuaugaaauaL96 | 234 | VPusAfsuuuCfaUfAfguucAfgAfgccugscsc | 318 | GGCAGGCUCUGAACUAUGAAAUC | 402 |
| AD-75677 | asgsgcucUfgAfAfCfuaugaaaucaL96 | 235 | VPusGfsauuUfcAfUfaguuCfaGfagccusgsc | 319 | GCAGGCUCUGAACUAUGAAAUCA | 403 |
| AD-75690 | gsgscucuGfaAfCfUfaugaaaucaaL96 | 236 | VPusUfsgauUfuCfAfuaguUfcAfgagccsusg | 320 | CAGGCUCUGAACUAUGAAAUCAG | 404 |
| AD-75716 | gscsucugAfaCfUfAfugaaaucagaL96 | 237 | VPusCfsugaUfuUfCfauagUfuCfagagcscsu | 321 | AGGCUCUGAACUAUGAAAUCAGA | 405 |
| AD-75682 | gsasggauAfuGfUfCfaucaucaaaaL96 | 238 | VPusUfsuugAfuGfAfugacAfuAfuccucsusg | 322 | CAGAGGAUAUGUCAUCAUCAAAC | 406 |
| AD-75720 | usasugucAfuCfAfUfcaaacccuuaL96 | 239 | VPusAfsaggGfuUfUfgaugAfuGfacauasusc | 323 | GAUAUGUCAUCAUCAAACCCUUG | 407 |
| AD-75725 | csasucauCfaAfAfCfccuugguguaL96 | 240 | VPusAfscacCfaAfGfgguuUfgAfugaugsasc | 324 | GUCAUCAUCAAACCCUUGGUGUG | 408 |
| AD-75695 | asascgagAfgCfAfCfuugaaaaugaL96 | 241 | VPusCfsauuUfuCfAfagugCfuCfucguusgsa | 325 | UCAACGAGAGCACUUGAAAAUGA | 409 |
| AD-75665 | csgsagagCfaCfUfUfgaaaaugaaaL96 | 242 | VPusUfsucaUfuUfUfcaagUfgCfucucgsusu | 326 | AACGAGAGCACUUGAAAAUGAAA | 410 |
| AD-75661 | asgscacuUfgAfAfAfaugaaaugaaL96 | 243 | VPusUfscauUfuCfAfuuuuCfaAfgugcuscsu | 327 | AGAGCACUUGAAAAUGAAAUGAC | 411 |
| AD-75658 | gscsacuuGfaAfAfAfugaaaugacaL96 | 244 | VPusGfsucaUfuUfCfauuuUfcAfagugcsusc | 328 | GAGCACUUGAAAAUGAAAUGACU | 412 |
| AD-75700 | asasaugaAfaUfGfAfcugucuaagaL96 | 245 | VPusCfsuuaGfaCfAfgucaUfuUfcauuususc | 329 | GAAAAUGAAAUGACUGUCUAAGA | 413 |
| AD-75698 | asasugaaAfuGfAfCfugucuaagaaL96 | 246 | VPusUfscuuAfgAfCfagucAfuUfucauususu | 330 | AAAAUGAAAUGACUGUCUAAGAG | 414 |
| AD-75672 | usgsaaauGfaCfUfGfucuaagagaaL96 | 247 | VPusUfscucUfuAfGfacagUfcAfuuucasusu | 331 | AAUGAAAUGACUGUCUAAGAGAU | 415 |
| AD-75684 | gsasaaugAfcUfGfUfcuaagagauaL96 | 248 | VPusAfsucuCfuUfAfgacaGfuCfauuucsasu | 332 | AUGAAAUGACUGUCUAAGAGAUC | 416 |
| AD-75667 | asasaugaCfuGfUfCfuaagagaucaL96 | 249 | VPusGfsaucUfcUfUfagacAfgUfcauuuscsa | 333 | UGAAAUGACUGUCUAAGAGAUCU | 417 |
| AD-75678 | csasacugGfaUfAfCfuagaucuuaaL96 | 250 | VPusUfsaagAfuCfUfaguaUfcCfaguugscsu | 334 | AGCAACUGGAUACUAGAUCUUAC | 418 |
| AD-75660 | gscsagcuCfuUfUfCfuucuuugaaaL96 | 251 | VPusUfsucaAfaGfAfagaaAfgAfgcugcsasg | 335 | CUGCAGCUCUUUCUUCUUUGAAU | 419 |
| AD-75701 | csuscuuuCfuUfCfUfuugaauuucaL96 | 252 | VPusGfsaaaUfuCfAfaagaAfgAfaagagscsu | 336 | AGCUCUUUCUUCUUUGAAUUUCC | 420 |
| AD-75707 | csusuucuUfcUfUfUfgaauuuccuaL96 | 253 | VPusAfsggaAfaUfUfcaaaGfaAfgaaagsasg | 337 | CUCUUUCUUCUUUGAAUUUCCUA | 421 |
| AD-75675 | csusuugaAfuUfUfCfcuaucuguaaL96 | 254 | VPusUfsacaGfaUfAfggaaAfuUfcaaagsasa | 338 | UUCUUUGAAUUUCCUAUCUGUAU | 422 |
| AD-75671 | ususugaaUfuUfCfCfuaucuguauaL96 | 255 | VPusAfsuacAfgAfUfaggaAfaUfucaaasgsa | 339 | UCUUUGAAUUUCCUAUCUGUAUG | 423 |
| AD-75683 | usgsaauuUfcCfUfAfucuguauguaL96 | 256 | VPusAfscauAfcAfGfauagGfaAfauucasasa | 340 | UUUGAAUUUCCUAUCUGUAUGUC | 424 |
| AD-75689 | asasuuucCfuAfUfCfuguaugucuaL96 | 257 | VPusAfsgacAfuAfCfagauAfgGfaaauuscsa | 341 | UGAAUUUCCUAUCUGUAUGUCUG | 425 |
| AD-75715 | asuscuguAfuGfUfCfugccuaauuaL96 | 258 | VPusAfsauuAfgGfCfagacAfuAfcagausasg | 342 | CUAUCUGUAUGUCUGCCUAAUUA | 426 |
| AD-75705 | usgsuaugUfcUfGfCfcuaauuaaaaL96 | 259 | VPusUfsuuaAfuUfAfggcaGfaCfauacasgsa | 343 | UCUGUAUGUCUGCCUAAUUAAAA | 427 |
| AD-75704 | gsusauguCfuGfCfCfuaauuaaaaaL96 | 260 | VPusUfsuuuAfaUfUfaggcAfgAfcauacsasg | 344 | CUGUAUGUCUGCCUAAUUAAAAA | 428 |
| AD-75713 | usasugucUfgCfCfUfaauuaaaaaaL96 | 261 | VPusUfsuuuUfaAfUfuaggCfaGfacauascsa | 345 | UGUAUGUCUGCCUAAUUAAAAAA | 429 |
| AD-75702 | usgsucugCfcUfAfAfuuaaaaaaaaL96 | 262 | VPusUfsuuuUfuUfAfauuaGfgCfagacasusa | 346 | UAUGUCUGCCUAAUUAAAAAAAU | 430 |
| AD-75709 | ususguauUfaUfGfCfuaccugcaaaL96 | 263 | VPusUfsugcAfgGfUfagcaUfaAfuacaasusa | 347 | UAUUGUAUUAUGCUACCUGCAAA | 431 |
| AD-75710 | ususaugcUfaCfCfUfgcaaaaaaaaL96 | 264 | VPusUfsuuuUfuUfGfcaggUfaGfcauaasusa | 348 | UAUUAUGCUACCUGCAAAAAAAA | 432 |

TABLE 4B
BAPCS iRNAs-Modified Sequences

| | Sense Sequence 5'-3' | SEQ ID | |
|---|---|---|---|
| Duplex Name | Antisense Sequence 5'-3' | NO: | Range in NM_011318.2 |
| AD-197584.1 | csasaugaGfcUfAfCfuaauuuauaaL96 | | NM_011318.2_401-421_s |
| | VPusUfsauaAfaUfUfaguaGfcUfcauugsusc | | NM_011318.2_399-421_as |
| AD-197510.1 | asusuuuaCfaCfUfGfuguuuccgaaL96 | | NM_011318.2_322-342_s |
| | VPusUfscggAfaAfCfacagUfgUfaaaaususc | | NM_011318.2_320-342_as |
| AD-197583.1 | ascsaaugAfgCfUfAfcuaauuuauaL96 | | NM_011318.2_400-420_s |
| | VPusAfsuaaAfuUfAfguagCfuCfauuguscsu | | NM_011318.2_398-420_as |
| AD-75728.3 | gscsagaaUfuUfUfAfcacuguguuaL96 | | NM_011318.2_319-338_s |
| | VPusAfsacaCfaGfUfguaaAfaUfucugcsasg | | NM_011318.2_317-338_as |
| AD-197508.1 | gsasauuuUfaCfAfCfuguguuuccaL96 | | NM_011318.2_320-340_G21A_s |
| | VPusGfsgaaAfcAfCfagugUfaAfaauucsusg | | NM_011318.2_318-340_C1U_as |
| AD-75737.3 | csasgaauUfuUfAfCfacuguguuuaL96 | | NM_011318.2_320-339_C21A_s |
| | VPusAfsaacAfcAfGfuguaAfaAfuucugscsa | | NM_011318.2_318-339_C21A_as |
| AD-197550.1 | csuscagaGfuCfUfUfuucuccuacaL96 | | NM_011318.2_364-384_s |
| | VPusGfsuagGfaGfAfaaagAfcUfcugagsasg | | NM_011318.2_362-384_as |
| AD-197582.1 | gsascaauGfaGfCfUfacuaauuuaaL96 | | NM_011318.2_399-419_s |
| | VPusUfsaaaUfuAfGfuagcUfcAfuugucsusc | | NM_011318.2_397-419_as |
| AD-75732.3 | asgsacaaUfgAfGfCfuacuaauuuaL96 | | NM_011318.2_400-419_s |
| | VPusAfsaauUfaGfUfagcuCfaUfugucuscsu | | NM_011318.2_398-419_as |
| AD-197726.1 | asusggaaAfgCfCfUfuggguaaaaaL96 | | NM_011318.2_556-576_s |
| | VPusUfsuuuAfcCfCfaaggCfuUfuccaususg | | NM_011318.2_554-576_as |
| AD-197544.1 | cscscgcuCfuCfAfGfagucuuuucaL96 | | NM_011318.2_358-378_s |
| | VPusGfsaaaAfgAfCfucugAfgAfgcgggsasa | | NM_011318.2_356-378_as |
| AD-197551.1 | uscsagagUfcUfUfUfucuccuacaaL96 | | NM_011318.2_365-385_G21A_s |
| | VPusUfsguaGfgAfGfaaaaGfaCfucugasgsa | | NM_011318.2_363-385_C1U_as |
| AD-75730.2 | gsasgacaAfuGfAfGfcuacuaauuaL96 | | NM_011318.2_399-418_s |
| | VPusAfsauuAfgUfAfgcucAfuUfgucucsusg | | NM_011318.2_397-418_as |
| AD-197410.1 | ususcaccAfgCfCfUfucuuucagaaL96 | | NM_011318.2_198-218_s |
| | VPusUfscugAfaAfGfaaggCfuGfgugaasgsa | | NM_011318.2_196-218_as |
| AD-197556.1 | uscsuuuuCfuCfCfUfacagugucaaL96 | | NM_011318.2_371-391_s |
| | VPusUfsgacAfcUfGfuaggAfgAfaaagascsu | | NM_011318.2_369-391_as |
| AD-197534.1 | asgsugacCfuUfUfCfccgcucucaaL96 | | NM_011318.2_348-368_G21A_s |
| | VPusUfsgagAfgCfGfggaaAfgGfucacusgsu | | NM_011318.2_346-368_C1U_as |
| AD-75734.2 | asgsagucUfuUfUfCfuccuacaguaL96 | | NM_011318.2_369-388_G21A_s |
| | VPusAfscugUfaGfGfagaaAfaGfacucusgsa | | NM_011318.2_367-388_G21A_as |
| AD-197503.1 | csuscugcAfgAfAfUfuuuacacugaL96 | | NM_011318.2_313-333_s |
| | VPusCfsaguGfuAfAfaauuCfuGfcagagsgsu | | NM_011318.2_311-333_as |
| AD-197406.1 | usgsucuuCfaCfCfAfgccuucuuuaL96 | | NM_011318.2_194-214_C21A_s |
| | VPusAfsaagAfaGfGfcuggUfgAfagacasasa | | NM_011318.2_192-214_G1U_as |
| AD-197416.1 | asgsccuuCfuUfUfCfagaagccuuaL96 | | NM_011318.2_204-224_s |
| | VPusAfsaggCfuUfCfugaaAfgAfaggcusgsg | | NM_011318.2_202-224_as |
| AD-197725.1 | asasuggaAfaGfCfCfuuggguaaaaL96 | | NM_011318.2_555-575_s |
| | VPusUfsuuaCfcCfAfaggcUfuUfccauusgsa | | NM_011318.2_553-575_as |
| AD-197546.1 | csgscucuCfaGfAfGfucuuuucucaL96 | | NM_011318.2_360-380_C21A_s |
| | VPusGfsagaAfaAfGfacucUfgAfgagcgsgsg | | NM_011318.2_358-380_G1U_as |
| AD-197724.1 | csasauggAfaAfGfCfcuuggguaaaL96 | | NM_011318.2_554-574_s |
| | VPusUfsuacCfcAfAfggcuUfuCfcauugsasc | | NM_011318.2_552-574_as |
| AD-197408.1 | uscsuucaCfcAfGfCfcuucuuucaaL96 | | NM_011318.2_196-216_G21A_s |
| | VPusUfsgaaAfgAfAfggcuGfgUfgaagascsa | | NM_011318.2_194-216_ClU_as |
| AD-197548.1 | csuscucaGfaGfUfCfuuuucuccuaL96 | | NM_011318.2_362-382_s |
| | VPusAfsggaGfaAfAfagacUfcUfgagagscsg | | NM_011318.2_360-382_as |
| AD-197565.1 | csasgagaCfaAfUfGfagcuacuaaaL96 | | NM_011318.2_397-416_s |
| | VPusUfsuagUfaGfCfucauUfgUfcucugscsc | | NM_011318.2_395-416_as |
| AD-197581.1 | asgsagacAfaUfGfAfgcuacuaauaL96 | | NM_011318.2_396-416_s |
| | VPusAfsuuaGfuAfGfcucaUfuGfucucusgsc | | NM_011318.2_394-416_as |
| AD-197552.1 | csasgaguCfuUfUfUfcuccuacagaL96 | | NM_011318.2_366-386_s |
| | VPusCfsuguAfgGfAfgaaaAfgAfcucugsasg | | NM_011318.2_364-386_as |
| AD-197549.1 | uscsucagAfgUfCfUfuuucuccuaaL96 | | NM_011318.2_363-383_C21A_s |
| | VPusUfsaggAfgAfAfaagaCfuCfugagasgsc | | NM_011318.2_361-383_G1U_as |
| AD-197529.1 | cscsuacaGfuGfAfCfcuuucccgcaL96 | | NM_011318.2_343-363_s |
| | VPusGfscggGfaAfAfggucAfcUfguaggsusu | | NM_011318.2_341-363_as |
| AD-197417.1 | gscscuucUfuUfCfAfgaagccuuuaL96 | | NM_011318.2_205-225_s |
| | VPusAfsaagGfcUfUfcugaAfaGfaaggcsusg | | NM_011318.2_203-225_as |
| AD-197543.1 | uscsccgcUfcUfCfAfgagucuuuuaL96 | | NM_011318.2_357-377_C21A_s |
| | VPusAfsaaaGfaCfUfcugaGfaGfcgggasasa | | NM_011318.2_355-377_G1U_as |
| AD-197555.1 | gsuscuuuUfcUfCfCfuacagugucaL96 | | NM_011318.2_370-390_s |
| | VPusGfsacaCfuGfUfaggaGfaAfaagacsusc | | NM_011318.2_368-390_as |
| AD-197530.1 | csusacagUfgAfCfCfuuucccgcuaL96 | | NM_011318.2_344-364_C21A_s |
| | VPusAfsgcgGfgAfAfagguCfaCfuguagsgsu | | NM_011318.2_342-364_G1U_as |
| AD-197554.1 | asgsucuuUfuCfUfCfcuacaguguaL96 | | NM_011318.2_369-389_C21A_s |
| | VPusAfscacUfgUfAfggagAfaAfagacuscsu | | NM_011318.2_367-389_G1U_as |
| AD-197532.1 | ascsagugAfcCfUfUfucccgcucuaL96 | | NM_011318.2_346-366_C21A_s |
| | VPusAfsgagCfgGfGfaaagGfuCfacugusasg | | NM_011318.2_344-366_G1U_as |
| AD-197412.1 | csasccagCfcUfUfCfuuucagaagaL96 | | NM_011318.2_200-220_C21A_s |
| | VPusCfsuucUfgAfAfagaaGfgCfuggugsasa | | NM_011318.2_198-220_G1U_as |
| AD-197713.1 | gsasauuuUfgGfGfUfcaauggaaaaL96 | | NM_011318.2_543-563_s |
| | VPusUfsuucCfaUfUfgaccCfaAfaauucsasa | | NM_011318.2_541-563_as |
| AD-197411.1 | uscsaccaGfcCfUfUfcuuucagaaaL96 | | NM_011318.2_199-219_G21A_s |
| | VPusUfsucuGfaAfAfgaagGfcUfggugasasg | | NM_011318.2_197-219_C1U_as |
| AD-197557.1 | csusuuucUfcCfUfAfcagugucaaaL96 | | NM_011318.2_372-392_G21A_s |
| | VPusUfsugaCfaCfUfguagGfaGfaaaagsasc | | NM_011318.2_370-392_C1U_as |
| AD-197528.1 | ascscuacAfgUfGfAfccuuucccgaL96 | | NM_011318.2_342-362_C21A_s |
| | VPusCfsgggAfaAfGfgucaCfuGfuaggususc | | NM_011318.2_340-362_G1U_as |
| AD-197631.1 | uscsaaaaGfuCfAfCfaguccguggaL96 | | NM_011318.2_459-479_s |
| | VPusCfscacGfgAfCfugugAfcUfuuugasusu | | NM_011318.2_457-479_as |
| AD-197541.1 | ususucccGfcUfCfUfcagagucuuaL96 | | NM_011318.2_355-375_s |
| | VPusAfsagaCfuCfUfgagaGfcGfggaaasgsg | | NM_011318.2_353-375_as |
| AD-197533.1 | csasgugaCfcUfUfUfcccgcucucaL96 | | NM_011318.2_347-367_s |
| | VPusGfsagaGfcGfGfgaaaGfgUfcacugsusa | | NM_011318.2_345-367_as |
| AD-197632.1 | csasaaagUfcAfCfAfguccgugguaL96 | | NM_011318.2_460-480_s |
| | VPusAfsccaCfgGfAfcuguGfaCfuuuugsasu | | NM_011318.2_458-480_as |
| AD-197542.1 | ususcccgCfuCfUfCfagagucuuuaL96 | | NM_011318.2_356-376_s |
| | VPusAfsaagAfcUfCfugagAfgCfgggaasasg | | NM_011318.2_354-376_as |
| AD-197629.1 | asasucaaAfaGfUfCfacaguccguaL96 | | NM_011318.2_457-477_G21A_s |
| | VPusAfscggAfcUfGfugacUfuUfugauusgsu | | NM_011318.2_455-477_C1U_as |

TABLE 5A
APCS Single Dose Screen in Cos7 cells

| | |
|---|---|
| 10 nM | 0.1 nM |

| | Avg [% | | Avg [% | |
|---|---|---|---|---|
| | message | | message | |
| Duplex ID | remaining] | SD | remaining] | SD |
| AD-75727.1 | 39.3 | 3.8 | 92.0 | 8.5 |
| AD-75729.1 | 49.7 | 9.1 | 101.7 | 24.5 |
| AD-75730.1 | 30.7 | 5.9 | 98.1 | 11.8 |
| AD-75739.1 | 24.1 | 16.8 | 86.0 | 9.9 |
| AD-75738.1 | 86.2 | 6.8 | 91.1 | 15.9 |
| AD-75728.1 | 121.2 | 7.5 | 109.0 | 3.9 |
| AD-75737.1 | 106.3 | 17.9 | 115.5 | 13.0 |
| AD-75733.1 | 23.2 | 7.5 | 59.0 | 15.4 |
| AD-75732.1 | 16.1 | 3.3 | 62.7 | 18.2 |
| AD-75736.1 | 72.7 | 18.7 | 101.5 | 21.4 |
| AD-75731.1 | 124.0 | 18.6 | 106.2 | 7.8 |
| AD-75666.1 | 7.2 | 1.0 | 31.4 | 3.3 |
| AD-75734.1 | 122.9 | 14.4 | 101.0 | 8.3 |
| AD-75735.1 | 86.5 | 7.3 | 104.2 | 10.6 |
| AD-75663.1 | 5.3 | 1.7 | 41.4 | 10.8 |
| AD-75677.1 | 25.9 | 5.3 | 74.7 | 6.8 |
| AD-75696.1 | 8.8 | 0.5 | 32.4 | 0.9 |
| AD-75676.1 | 15.3 | 6.9 | 50.0 | 14.8 |
| AD-75669.1 | 8.3 | 1.0 | 47.4 | 14.6 |
| AD-75718.1 | 11.0 | 2.9 | 36.5 | 9.9 |
| AD-75693.1 | 20.8 | 2.5 | 79.2 | 8.5 |
| AD-75667.1 | 14.2 | 3.2 | 67.8 | 10.7 |
| AD-75678.1 | 12.7 | 1.9 | 48.4 | 1.8 |
| AD-75691.1 | 9.5 | 2.0 | 35.0 | 5.0 |
| AD-75717.1 | 14.0 | 3.1 | 67.7 | 9.4 |
| AD-75697.1 | 8.4 | 1.3 | 39.5 | 9.9 |
| AD-75692.1 | 4.8 | 0.4 | 20.9 | 3.3 |
| AD-75720.1 | 7.3 | 1.4 | 54.0 | 5.8 |
| AD-75706.1 | 9.0 | 1.8 | 42.7 | 14.2 |
| AD-75694.1 | 9.7 | 2.8 | 51.2 | 15.5 |
| AD-75679.1 | 3.0 | 0.7 | 28.1 | 5.5 |
| AD-75684.1 | 11.3 | 3.0 | 63.5 | 1.4 |
| AD-75686.1 | 7.0 | 1.5 | 32.6 | 2.7 |
| AD-75687.1 | 5.7 | 1.3 | 51.4 | 6.0 |
| AD-75674.1 | 8.2 | 1.7 | 54.8 | 5.3 |
| AD-75723.1 | 13.0 | 3.0 | 61.3 | 13.6 |
| AD-75685.1 | 8.6 | 1.6 | 52.1 | 5.6 |
| AD-75681.1 | 28.9 | 5.1 | 85.1 | 11.4 |
| AD-75675.1 | 5.9 | 1.8 | 28.2 | 1.1 |
| AD-75671.1 | 3.8 | 0.5 | 20.4 | 5.5 |
| AD-75689.1 | 4.5 | 0.6 | 20.8 | 3.8 |
| AD-75657.1 | 7.5 | 0.2 | 32.3 | 6.4 |
| AD-75659.1 | 9.6 | 1.6 | 38.1 | 12.2 |
| AD-75714.1 | 12.1 | 2.5 | 85.6 | 11.8 |
| AD-75665.1 | 9.9 | 2.7 | 44.2 | 6.6 |
| AD-75664.2 | 7.8 | 1.8 | 56.7 | 8.2 |
| AD-75660.1 | 8.8 | 1.7 | 29.4 | 1.0 |
| AD-75708.1 | 11.3 | 1.8 | 69.9 | 8.9 |
| AD-75658.1 | 7.8 | 1.0 | 36.0 | 7.5 |
| AD-75680.1 | 7.7 | 1.7 | 58.9 | 6.5 |
| AD-75690.1 | 26.5 | 2.5 | 74.7 | 7.4 |
| AD-75688.1 | 15.2 | 2.1 | 63.2 | 9.4 |
| AD-75683.1 | 19.5 | 2.7 | 51.8 | 6.2 |
| AD-75716.1 | 11.1 | 3.3 | 66.0 | 9.9 |
| AD-75673.1 | 9.4 | 1.2 | 57.9 | 4.1 |
| AD-75707.1 | 6.1 | 0.5 | 53.4 | 13.1 |
| AD-75713.1 | 12.4 | 2.1 | 44.4 | 5.5 |
| AD-75672.1 | 9.3 | 1.8 | 59.3 | 6.5 |
| AD-75699.1 | 7.9 | 0.6 | 37.0 | 4.2 |
| AD-75703.1 | 14.8 | 4.2 | 56.3 | 7.7 |
| AD-75719.1 | 6.0 | 0.9 | 30.6 | 7.0 |
| AD-75704.1 | 10.8 | 1.6 | 34.9 | 6.4 |
| AD-75661.1 | 9.6 | 1.2 | 40.5 | 2.5 |
| AD-75712.1 | 13.6 | 4.6 | 39.0 | 7.3 |
| AD-75705.1 | 8.8 | 1.3 | 17.8 | 6.0 |
| AD-75702.1 | 8.0 | 1.1 | 25.7 | 3.4 |
| AD-75722.1 | 71.6 | 8.6 | 99.6 | 22.2 |
| AD-75670.1 | 16.6 | 5.3 | 67.0 | 7.6 |
| AD-75700.1 | 8.7 | 1.7 | 24.8 | 5.0 |
| AD-75701.1 | 6.0 | 1.8 | 28.5 | 2.4 |
| AD-75668.1 | 33.5 | 2.3 | 71.7 | 11.0 |
| AD-75709.1 | 17.2 | 3.5 | 55.6 | 4.1 |
| AD-75711.1 | 10.4 | 1.6 | 47.5 | 2.9 |
| AD-75726.1 | 18.3 | 2.4 | 48.3 | 12.8 |
| AD-75662.1 | 7.0 | 3.2 | 35.2 | 4.6 |
| AD-75721.1 | 17.5 | 2.7 | 55.4 | 9.9 |
| AD-75695.1 | 13.1 | 0.8 | 48.5 | 6.4 |
| AD-75664.1 | 11.6 | 2.7 | 53.8 | 5.5 |
| AD-75682.1 | 12.4 | 3.2 | 53.8 | 6.8 |
| AD-75710.1 | 78.0 | 11.2 | 101.4 | 6.3 |
| AD-75698.1 | 11.4 | 0.8 | 31.3 | 11.0 |
| AD-75724.1 | 26.6 | 4.4 | 81.6 | 17.6 |
| AD-75725.1 | 30.4 | 2.4 | 79.0 | 11.5 |
| AD-75715.1 | 9.3 | 1.5 | 53.2 | 5.1 |

TABLE 5B
APCS Single Dose Screen in Cos7 cells

| | 10 nM | | 1 nM | | 0.1 nM | |
|---|---|---|---|---|---|---|
| | Avg | | Avg | | Avg | |
| | [% | | [% | | [% | |
| | message | | message | | message | |
| Duplex ID | remaining] | SD | remaining] | SD | remaining] | SD |
| AD-197584.1 | 10.0 | 1.0 | 9.6 | 1.3 | 33.8 | 1.9 |
| AD-197510.1 | 3.4 | 0.2 | 6.6 | 1.2 | 34.9 | 5.0 |
| AD-197583.1 | 7.3 | 0.5 | 8.6 | 0.4 | 35.9 | 3.2 |
| AD-75728.3 | 8.8 | 2.6 | 11.4 | 1.9 | 39.4 | 6.8 |
| AD-197508.1 | 5.4 | 0.5 | 10.2 | 3.2 | 46.1 | 5.6 |
| AD-75737.3 | 11.7 | 1.3 | 18.1 | 1.2 | 48.7 | 3.4 |
| AD-197550.1 | 5.6 | 1.2 | 17.0 | 8.3 | 49.3 | 10.0 |
| AD-197582.1 | 9.7 | 0.8 | 15.4 | 1.4 | 49.9 | 5.0 |
| AD-75732.3 | 9.7 | 0.5 | 14.3 | 2.0 | 54.8 | 6.3 |
| AD-197726.1 | 20.3 | 3.8 | 23.0 | 3.8 | 58.9 | 3.1 |
| AD-197544.1 | 13.1 | 0.7 | 23.7 | 2.8 | 60.9 | 7.6 |
| AD-197551.1 | 7.9 | 0.9 | 15.5 | 0.8 | 64.1 | 9.8 |
| AD-75730.2 | 8.1 | 0.7 | 22.6 | 2.9 | 65.3 | 4.5 |
| AD-197410.1 | 10.6 | 0.3 | 21.7 | 1.0 | 65.4 | 11.2 |
| AD-197556.1 | 12.1 | 0.7 | 25.1 | 2.7 | 65.5 | 8.9 |
| AD-197534.1 | 14.1 | 0.8 | 21.5 | 3.4 | 66.8 | 10.1 |
| AD-75734.2 | 18.0 | 0.8 | 36.7 | 4.4 | 67.9 | 5.8 |
| AD-197503.1 | 10.1 | 0.8 | 20.5 | 3.1 | 68.1 | 2.3 |
| AD-197406.1 | 8.0 | 0.6 | 24.6 | 5.7 | 68.4 | 6.8 |
| AD-197416.1 | 8.3 | 2.2 | 23.1 | 2.0 | 69.2 | 6.1 |
| AD-197725.1 | 25.2 | 3.1 | 25.2 | 1.7 | 69.6 | 11.6 |
| AD-197546.1 | 12.9 | 1.6 | 23.6 | 2.8 | 71.1 | 5.5 |
| AD-197724.1 | 18.4 | 1.5 | 45.3 | 11.2 | 71.5 | 9.2 |
| AD-197408.1 | 16.1 | 0.4 | 37.4 | 7.7 | 72.9 | 5.5 |
| AD-197548.1 | 9.0 | 0.7 | 24.5 | 7.4 | 72.9 | 7.1 |
| AD-197565.1 | 17.0 | 2.1 | 26.9 | 4.2 | 73.7 | 5.5 |
| AD-197581.1 | 17.0 | 0.6 | 34.1 | 6.8 | 75.4 | 3.3 |
| AD-197552.1 | 6.0 | 1.1 | 19.8 | 5.3 | 75.7 | 7.5 |
| AD-197549.1 | 8.6 | 0.6 | 24.3 | 3.5 | 76.5 | 7.4 |
| AD-197529.1 | 18.0 | 1.3 | 43.8 | 8.1 | 76.9 | 4.0 |
| AD-197417.1 | 13.6 | 2.1 | 30.4 | 3.4 | 77.3 | 4.2 |
| AD-197543.1 | 17.2 | 0.8 | 37.1 | 6.3 | 77.4 | 6.1 |
| AD-197555.1 | 12.8 | 1.5 | 27.2 | 1.0 | 78.0 | 11.6 |
| AD-197530.1 | 16.8 | 1.1 | 31.5 | 2.3 | 79.0 | 3.4 |
| AD-197554.1 | 15.8 | 1.4 | 35.3 | 4.0 | 79.2 | 3.8 |
| AD-197532.1 | 17.4 | 1.3 | 33.8 | 3.1 | 80.5 | 1.5 |
| AD-197412.1 | 16.4 | 1.5 | 27.9 | 6.4 | 80.9 | 9.5 |
| AD-197713.1 | 35.5 | 6.0 | 41.6 | 4.5 | 83.5 | 8.5 |
| AD-197411.1 | 21.8 | 1.3 | 41.8 | 2.2 | 83.6 | 8.8 |
| AD-197557.1 | 32.4 | 2.6 | 53.2 | 9.5 | 84.0 | 8.9 |
| AD-197528.1 | 15.4 | 1.8 | 51.9 | 10.6 | 84.5 | 4.7 |
| AD-197631.1 | 38.1 | 4.3 | 53.2 | 6.4 | 87.2 | 10.0 |
| AD-197541.1 | 27.6 | 1.1 | 61.0 | 6.5 | 87.2 | 10.1 |
| AD-197533.1 | 23.4 | 0.5 | 43.4 | 11.0 | 87.9 | 5.4 |
| AD-197632.1 | 31.4 | 1.3 | 56.9 | 5.4 | 88.8 | 5.4 |
| AD-197542.1 | 21.3 | 4.3 | 41.1 | 4.3 | 91.3 | 4.1 |
| AD-197629.1 | 15.5 | 0.9 | 40.9 | 5.3 | 91.8 | 5.4 |

### Example 2. IRNA Design, Synthesis, Selection, and In Vitro Evaluation

### Bioinformatics

[0517] An additional set of siRNAs targeting the human APCS (SAP), “amyloid P component, serum” (human: NCBI refseqlD NM_001639.3; NCBI GeneID: 325) as well the toxicology-species APCS ortholog from cynomolgus monkey: XM_005541312.2) was designed using custom R and Python scripts. All the siRNA designs are a perfect match to the human APCS transcript and a subset have either perfect or near-perfect matches to the cynomolgus monkey ortholog. The human NM_001639 REFSEQ mRNA, version 3, has a length of 960 bases.

[0518] A detailed list of the unmodified SAP sense and antisense strand sequences is shown in Table 6. A detailed list of the modified SAP sense and antisense strand sequences is shown in Table 7.

### In Vitro Screen

### Dual-Glo® Luciferase Assay

[0519] Cos7 cells (ATCC, Manassas, VA) were grown to near confluence at 37° C. in an atmosphere of 5% CO2 in DMEM (ATCC) supplemented with 10% FBS, before being released from the plate by trypsinization. siRNA and psiCHECK2-APCS plasmid transfection was carried out by adding 5 μl of siRNA duplexes and 5 μl of psiCHECK2-APCS plasmid per well along with 5 μl of Opti-MEM plus 0.1 μl of Lipofectamine 2000 per well (Invitrogen, Carlsbad CA. cat #13778-150) and then incubated at room temperature for 15 minutes. The mixture was then added to the cells which were re-suspended in 35 μl of fresh complete media. The transfected cells were incubated at 37° C. in an atmosphere of 5% CO2.

[0520] Forty-eight hours after the siRNAs and psiCHECK2-APCS plasmid were transfected; Firefly (transfection control) and Renilla (fused to ANGPTL4 target sequence) luciferase were measured. First, media was removed from cells. Then Firefly luciferase activity was measured by adding 20 μl of Dual-Glo® Luciferase Reagent equal to the culture medium volume to each well and mix. The mixture was incubated at room temperature for 30 minutes before luminescence (500 nm) was measured on a Spectramax (Molecular Devices) to detect the Firefly luciferase signal. Renilla luciferase activity was measured by adding 20 μl of room temperature of Dual-Glo® Stop & Glo® Reagent to each well and the plates were incubated for 10-15 minutes before luminescence was again measured to determine the Renilla luciferase signal. The Dual-Glo® Stop & Glo® Reagent, quenches the firefly luciferase signal and sustained luminescence for the Renilla luciferase reaction. siRNA activity was determined by normalizing the Renilla (HBV) signal to the Firefly (control) signal within each well. The magnitude of siRNA activity was then assessed relative to cells that were transfected with the same vector but were not treated with siRNA or were treated with a non-targeting siRNA. All transfections were done at n=2 or greater. Table 8 shows the results of a single dose screen. Data are expressed as percent of mRNA remaining relative to untreated Cos7 cells.

TABLE 6
APCS iRNAs-Unmodified Sequences

| Duplex | | SEQ ID | | SEQ ID | Range in |
|---|---|---|---|---|---|
| Name | transSeq | NO: | transSeq | NO: | NM_001639.3 |
| AD-77749 | AAUAUCAGACGCUAGGGGA | 433 | UCCCCUAGCGUCUGAUAUU | 501 | 7-25 |
| AD-77750 | GGGGGACAGCCACUGUGUU | 434 | AACACAGUGGCUGUCCCCC | 502 | 22-40 |
| AD-77751 | UUGUCUGCUACCCUCAUCA | 435 | UGAUGAGGGUAGCAGACAA | 503 | 39-57 |
| AD-77752 | CAUCCUGGUCACUGCUUCU | 436 | AGAAGCAGUGACCAGGAUG | 504 | 53-71 |
| AD-77753 | UUCUGCUAUAACAGCCCUA | 437 | UAGGGCUGUUAUAGCAGAA | 505 | 68-86 |
| AD-77754 | CCCUAGGCCAGGAAUAUGA | 438 | UCAUAUUCCUGGCCUAGGG | 506 | 82-100 |
| AD-77755 | CAGGAAUAUGAACAAGCCA | 439 | UGGCUUGUUCAUAUUCCUG | 507 | 90-108 |
| AD-77756 | AGCCGCUGCUUUGGAUCUA | 440 | UAGAUCCAAAGCAGCGGCU | 508 | 104-122 |
| AD-77757 | AUCUCUGUCCUCACCAGCA | 441 | UGCUGGUGAGGACAGAGAU | 509 | 118-136 |
| AD-77758 | CAGCCUCCUGGAAGCCUUU | 442 | AAAGGCUUCCAGGAGGCUG | 510 | 132-150 |
| AD-77759 | UUUGCUCACACAGACCUCA | 443 | UGAGGUCUGUGUGAGCAAA | 511 | 148-166 |
| AD-77760 | CCUCAGUGGGAAGGUGUUU | 444 | AAACACCUUCCCACUGAGG | 512 | 162-180 |
| AD-77761 | GGAAGGUGUUUGUAUUUCA | 445 | UGAAAUACAAACACCUUCC | 513 | 170-188 |
| AD-77762 | UUCCUAGAGAAUCUGUUAA | 446 | UUAACAGAUUCUCUAGGAA | 514 | 185-203 |
| AD-77763 | UUACUGAUCAUGUAAACUU | 447 | AAGUUUACAUGAUCAGUAA | 515 | 200-218 |
| AD-77764 | AACUUGAUCACACCGCUGA | 448 | UCAGCGGUGUGAUCAAGUU | 516 | 214-232 |
| AD-77765 | GCUGGAGAAGCCUCUACAA | 449 | UUGUAGAGGCUUCUCCAGC | 517 | 228-246 |
| AD-77766 | UACAGAACUUUACCUUGUA | 450 | UACAAGGUAAAGUUCUGUA | 518 | 242-260 |
| AD-77767 | ACUUUACCUUGUGUUUUCA | 451 | UGAAAACACAAGGUAAAGU | 519 | 248-266 |
| AD-77768 | UUCGAGCCUAUAGUGAUCU | 452 | AGAUCACUAUAGGCUCGAA | 520 | 263-281 |
| AD-77769 | GAUCUCUCUCGUGCCUACA | 453 | UGUAGGCACGAGAGAGAUC | 521 | 277-295 |
| AD-77770 | UCUCGUGCCUACAGCCUCU | 454 | AGAGGCUGUAGGCACGAGA | 522 | 283-301 |
| AD-77771 | CAGCCUCUUCUCCUACAAU | 455 | AUUGUAGGAGAAGAGGCUG | 523 | 294-312 |
| AD-77772 | CAAUACCCAAGGCAGGGAU | 456 | AUCCCUGCCUUGGGUAUUG | 524 | 309-327 |
| AD-77773 | GGGAUAAUGAGCUACUAGU | 457 | ACUAGUAGCUCAUUAUCCC | 525 | 323-341 |
| AD-77774 | UAGUUUAUAAAGAAAGAGU | 458 | ACUCUUUCUUUAUAAACUA | 526 | 338-356 |
| AD-77775 | AGAGUUGGAGAGUAUAGUA | 459 | UACUAUACUCUCCAACUCU | 527 | 352-370 |
| AD-77776 | UAGUCUAUACAUUGGAAGA | 460 | UCUUCCAAUGUAUAGACUA | 528 | 366-384 |
| AD-77777 | UUGGAAGACACAAAGUUAA | 461 | UUAACUUUGUGUCUUCCAA | 529 | 377-395 |
| AD-77778 | CACAAAGUUACAUCCAAAG | 462 | CUUUGGAUGUAACUUUGUG | 530 | 385-403 |
| AD-77779 | AAAGUUAUCGAAAAGUUCA | 463 | UGAACUUUUCGAUAACUUU | 531 | 400-418 |
| AD-77780 | GUUCCCGGCUCCAGUGCAA | 464 | UUGCACUGGAGCCGGGAAC | 532 | 414-432 |
| AD-77781 | UGCACAUCUGUGUGAGCUA | 465 | UAGCUCACACAGAUGUGCA | 533 | 428-446 |
| AD-77782 | AGCUGGGAGUCCUCAUCAA | 466 | UUGAUGAGGACUCCCAGCU | 534 | 442-460 |
| AD-77783 | GUAUUGCUGAAUUUUGGAU | 467 | AUCCAAAAUUCAGCAAUAC | 535 | 461-479 |
| AD-77784 | GGAUCAAUGGGACACCUUU | 468 | AAAGGUGUCCCAUUGAUCC | 536 | 476-494 |
| AD-77785 | CUUUGGUGAAAAAGGGUCU | 469 | AGACCCUUUUUCACCAAAG | 537 | 491-509 |
| AD-77786 | GGUCUGCGACAGGGUUACU | 470 | AGUAACCCUGUCGCAGACC | 538 | 505-523 |
| AD-77787 | UUUGUAGAAGCUCAGCCCA | 471 | UGGGCUGAGCUUCUACAAA | 539 | 523-541 |
| AD-77788 | GCCCAAGAUUGUCCUGGGA | 472 | UCCCAGGACAAUCUUGGGC | 540 | 537-555 |
| AD-77789 | UGGGGCAGGAACAGGAUUA | 473 | UAAUCCUGUUCCUGCCCCA | 541 | 551-569 |
| AD-77790 | UCCUAUGGGGGCAAGUUUA | 474 | UAAACUUGCCCCCAUAGGA | 542 | 568-586 |
| AD-77791 | UUUGAUAGGAGCCAGUCCU | 475 | AGGACUGGCUCCUAUCAAA | 543 | 583-601 |
| AD-77792 | GUCCUUUGUGGGAGAGAUU | 476 | AAUCUCUCCCACAAAGGAC | 544 | 597-615 |
| AD-77793 | AGAUUGGGGAUUUGUACAU | 477 | AUGUACAAAUCCCCAAUCU | 545 | 611-629 |
| AD-77794 | UUUGUACAUGUGGGACUCU | 478 | AGAGUCCCACAUGUACAAA | 546 | 621-639 |
| AD-77795 | AUGUGGGACUCUGUGCUGA | 479 | UCAGCACAGAGUCCCACAU | 547 | 628-646 |
| AD-77796 | CUGCCCCCAGAAAAUAUCA | 480 | UGAUAUUUUCUGGGGGCAG | 548 | 643-661 |
| AD-77797 | UAUCCUGUCUGCCUAUCAA | 481 | UUGAUAGGCAGACAGGAUA | 549 | 657-675 |
| AD-77798 | CCUAUCAGGGUACCCCUCU | 482 | AGAGGGGUACCCUGAUAGG | 550 | 668-686 |
| AD-77799 | CUCUCCCUGCCAAUAUCCU | 483 | AGGAUAUUGGCAGGGAGAG | 551 | 683-701 |
| AD-77800 | UCCUGGACUGGCAGGCUCU | 484 | AGAGCCUGCCAGUCCAGGA | 552 | 698-716 |
| AD-77801 | UGGCAGGCUCUGAACUAUA | 485 | UAUAGUUCAGAGCCUGCCA | 553 | 706-724 |
| AD-77802 | UAUGAAAUCAGAGGAUAUA | 486 | UAUAUCCUCUGAUUUCAUA | 554 | 721-739 |
| AD-77803 | UAUGUCAUCAUCAAACCCU | 487 | AGGGUUUGAUGAUGACAUA | 555 | 736-754 |
| AD-77804 | ACCCUUGGUGUGGGUCUGA | 488 | UCAGACCCACACCAAGGGU | 556 | 750-768 |
| AD-77805 | UGUGGGUCUGAGGUCUUGA | 489 | UCAAGACCUCAGACCCACA | 557 | 758-776 |
| AD-77806 | UUGACUCAACGAGAGCACU | 490 | AGUGCUCUCGUUGAGUCAA | 558 | 773-791 |
| AD-77807 | GCACUUGAAAAUGAAAUGA | 491 | UCAUUUCAUUUUCAAGUGC | 559 | 787-805 |
| AD-77808 | AAUGACUGUCUAAGAGAUA | 492 | UAUCUCUUAGACAGUCAUU | 560 | 801-819 |
| AD-77809 | AGAUCUGGUCAAAGCAACU | 493 | AGUUGCUUUGACCAGAUCU | 561 | 815-833 |
| AD-77810 | CAAAGCAACUGGAUACUAA | 494 | UUAGUAUCCAGUUGCUUUG | 562 | 824-842 |
| AD-77811 | CUAGAUCUUACAUCUGCAA | 495 | UUGCAGAUGUAAGAUCUAG | 563 | 839-857 |
| AD-77812 | GCAGCUCUUUCUUCUUUGA | 496 | UCAAAGAAGAAAGAGCUGC | 564 | 854-872 |
| AD-77813 | UUGAAUUUCCUAUCUGUAU | 497 | AUACAGAUAGGAAAUUCAA | 565 | 869-887 |
| AD-77814 | CUAUCUGUAUGUCUGCCUA | 498 | UAGGCAGACAUACAGAUAG | 566 | 878-896 |
| AD-77815 | CCUAAUUAAAAAAAUAUAU | 499 | AUAUAUUUUUUUAAUUAGG | 567 | 893-911 |
| AD-77816 | UAUAUAUUGUAUUAUGCUA | 500 | UAGCAUAAUACAAUAUAUA | 568 | 907-925 |

TABLE 7
APCSiRNAs-Modified Sequences

| | senseOligo | | | antisOligo | | | | |
|---|---|---|---|---|---|---|---|---|
| Duplex Name | Name | oligoSeq | SEQ ID NO: | Name | oligoSeq | SEQ ID NO: | mRNA target sequence | SEQ ID NO: |
| AD-77749 | A-156212 | AAUAUCAGACGCUAGGGGAdTdT | 569 | A-156213 | UCCCCUAGCGUCUGAUAUUdTdT | 637 | AAUAUCAGACGCUAGGGGG | 705 |
| AD-77750 | A-156214 | GGGGGACAGCCACUGUGUUdTdT | 570 | A-156215 | AACACAGUGGCUGUCCCCCdTdT | 638 | GGGGGACAGCCACUGUGUU | 706 |
| AD-77751 | A-156216 | UUGUCUGCUACCCUCAUCAdTdT | 571 | A-156217 | UGAUGAGGGUAGCAGACAAdTdT | 639 | UUGUCUGCUACCCUCAUCC | 707 |
| AD-77752 | A-156218 | CAUCCUGGUCACUGCUUCUdTdT | 572 | A-156219 | AGAAGCAGUGACCAGGAUGdTdT | 640 | CAUCCUGGUCACUGCUUCU | 708 |
| AD-77753 | A-156220 | UUCUGCUAUAACAGCCCUAdTdT | 573 | A-156221 | UAGGGCUGUUAUAGCAGAAdTdT | 641 | UUCUGCUAUAACAGCCCUA | 709 |
| AD-77754 | A-156222 | CCCUAGGCCAGGAAUAUGAdTdT | 574 | A-156223 | UCAUAUUCCUGGCCUAGGGdTdT | 642 | CCCUAGGCCAGGAAUAUGA | 710 |
| AD-77755 | A-156224 | CAGGAAUAUGAACAAGCCAdTdT | 575 | A-156225 | UGGCUUGUUCAUAUUCCUGdTdT | 643 | CAGGAAUAUGAACAAGCCG | 711 |
| AD-77756 | A-156226 | AGCCGCUGCUUUGGAUCUAdTdT | 576 | A-156227 | UAGAUCCAAAGCAGCGGCUdTdT | 644 | AGCCGCUGCUUUGGAUCUC | 712 |
| AD-77757 | A-156228 | AUCUCUGUCCUCACCAGCAdTdT | 577 | A-156229 | UGCUGGUGAGGACAGAGAUdTdT | 645 | AUCUCUGUCCUCACCAGCC | 713 |
| AD-77758 | A-156230 | CAGCCUCCUGGAAGCCUUUdTdT | 578 | A-156231 | AAAGGCUUCCAGGAGGCUGdTdT | 646 | CAGCCUCCUGGAAGCCUUU | 714 |
| AD-77759 | A-156232 | UUUGCUCACACAGACCUCAdTdT | 579 | A-156233 | UGAGGUCUGUGUGAGCAAAdTdT | 647 | UUUGCUCACACAGACCUCA | 715 |
| AD-77760 | A-156234 | CCUCAGUGGGAAGGUGUUUdTdT | 580 | A-156235 | AAACACCUUCCCACUGAGGdTdT | 648 | CCUCAGUGGGAAGGUGUUU | 716 |
| AD-77761 | A-156236 | GGAAGGUGUUUGUAUUUCAdTdT | 581 | A-156237 | UGAAAUACAAACACCUUCCdTdT | 649 | GGAAGGUGUUUGUAUUUCC | 717 |
| AD-77762 | A-156238 | UUCCUAGAGAAUCUGUUAAdTdT | 582 | A-156239 | UUAACAGAUUCUCUAGGAAdTdT | 650 | UUCCUAGAGAAUCUGUUAC | 718 |
| AD-77763 | A-156240 | UUACUGAUCAUGUAAACUUdTdT | 583 | A-156241 | AAGUUUACAUGAUCAGUAAdTdT | 651 | UUACUGAUCAUGUAAACUU | 719 |
| AD-77764 | A-156242 | AACUUGAUCACACCGCUGAdTdT | 584 | A-156243 | UCAGCGGUGUGAUCAAGUUdTdT | 652 | AACUUGAUCACACCGCUGG | 720 |
| AD-77765 | A-156244 | GCUGGAGAAGCCUCUACAAdTdT | 585 | A-156245 | UUGUAGAGGCUUCUCCAGCdTdT | 653 | GCUGGAGAAGCCUCUACAG | 721 |
| AD-77766 | A-156246 | UACAGAACUUUACCUUGUAdTdT | 586 | A-156247 | UACAAGGUAAAGUUCUGUAdTdT | 654 | UACAGAACUUUACCUUGUG | 722 |
| AD-77767 | A-156248 | ACUUUACCUUGUGUUUUCAdTdT | 587 | A-156249 | UGAAAACACAAGGUAAAGUdTdT | 655 | ACUUUACCUUGUGUUUUCG | 723 |
| AD-77768 | A-156250 | UUCGAGCCUAUAGUGAUCUdTdT | 588 | A-156251 | AGAUCACUAUAGGCUCGAAdTdT | 656 | UUCGAGCCUAUAGUGAUCU | 724 |
| AD-77769 | A-156252 | GAUCUCUCUCGUGCCUACAdTdT | 589 | A-156253 | UGUAGGCACGAGAGAGAUCdTdT | 657 | GAUCUCUCUCGUGCCUACA | 725 |
| AD-77770 | A-156254 | UCUCGUGCCUACAGCCUCUdTdT | 590 | A-156255 | AGAGGCUGUAGGCACGAGAdTdT | 658 | UCUCGUGCCUACAGCCUCU | 726 |
| AD-77771 | A-156256 | CAGCCUCUUCUCCUACAAUdTdT | 591 | A-156257 | AUUGUAGGAGAAGAGGCUGdTdT | 659 | CAGCCUCUUCUCCUACAAU | 727 |
| AD-77772 | A-156258 | CAAUACCCAAGGCAGGGAUdTdT | 592 | A-156259 | AUCCCUGCCUUGGGUAUUGdTdT | 660 | CAAUACCCAAGGCAGGGAU | 728 |
| AD-77773 | A-156260 | GGGAUAAUGAGCUACUAGUdTdT | 593 | A-156261 | ACUAGUAGCUCAUUAUCCCdTdT | 661 | GGGAUAAUGAGCUACUAGU | 729 |
| AD-77774 | A-156262 | UAGUUUAUAAAGAAAGAGUdTdT | 594 | A-156263 | ACUCUUUCUUUAUAAACUAdTdT | 662 | UAGUUUAUAAAGAAAGAGU | 730 |
| AD-77775 | A-156264 | AGAGUUGGAGAGUAUAGUAdTdT | 595 | A-156265 | UACUAUACUCUCCAACUCUdTdT | 663 | AGAGUUGGAGAGUAUAGUC | 731 |
| AD-77776 | A-156266 | UAGUCUAUACAUUGGAAGAdTdT | 596 | A-156267 | UCUUCCAAUGUAUAGACUAdTdT | 664 | UAGUCUAUACAUUGGAAGA | 732 |
| AD-77777 | A-156268 | UUGGAAGACACAAAGUUAAdTdT | 597 | A-156269 | UUAACUUUGUGUCUUCCAAdTdT | 665 | UUGGAAGACACAAAGUUAC | 733 |
| AD-77778 | A-156270 | CACAAAGUUACAUCCAAAGdTdT | 598 | A-156271 | CUUUGGAUGUAACUUUGUGdTdT | 666 | CACAAAGUUACAUCCAAAG | 734 |
| AD-77779 | A-156272 | AAAGUUAUCGAAAAGUUCAdTdT | 599 | A-156273 | UGAACUUUUCGAUAACUUUdTdT | 667 | AAAGUUAUCGAAAAGUUCC | 735 |
| AD-77780 | A-156274 | GUUCCCGGCUCCAGUGCAAdTdT | 600 | A-156275 | UUGCACUGGAGCCGGGAACdTdT | 668 | GUUCCCGGCUCCAGUGCAC | 736 |
| AD-77781 | A-156276 | UGCACAUCUGUGUGAGCUAdTdT | 601 | A-156277 | UAGCUCACACAGAUGUGCAdTdT | 669 | UGCACAUCUGUGUGAGCUG | 737 |
| AD-77782 | A-156278 | AGCUGGGAGUCCUCAUCAAdTdT | 602 | A-156279 | UUGAUGAGGACUCCCAGCUdTdT | 670 | AGCUGGGAGUCCUCAUCAG | 738 |
| AD-77783 | A-156280 | GUAUUGCUGAAUUUUGGAUdTdT | 603 | A-156281 | AUCCAAAAUUCAGCAAUACdTdT | 671 | GUAUUGCUGAAUUUUGGAU | 739 |
| AD-77784 | A-156282 | GGAUCAAUGGGACACCUUUdTdT | 604 | A-156283 | AAAGGUGUCCCAUUGAUCCdTdT | 672 | GGAUCAAUGGGACACCUUU | 740 |
| AD-77785 | A-156284 | CUUUGGUGAAAAAGGGUCUdTdT | 605 | A-156285 | AGACCCUUUUUCACCAAAGdTdT | 673 | CUUUGGUGAAAAAGGGUCU | 741 |
| AD-77786 | A-156286 | GGUCUGCGACAGGGUUACUdTdT | 606 | A-156287 | AGUAACCCUGUCGCAGACCdTdT | 674 | GGUCUGCGACAGGGUUACU | 742 |
| AD-77787 | A-156288 | UUUGUAGAAGCUCAGCCCAdTdT | 607 | A-156289 | UGGGCUGAGCUUCUACAAAdTdT | 675 | UUUGUAGAAGCUCAGCCCA | 743 |
| AD-77788 | A-156290 | GCCCAAGAUUGUCCUGGGAdTdT | 608 | A-156291 | UCCCAGGACAAUCUUGGGCdTdT | 676 | GCCCAAGAUUGUCCUGGGG | 744 |
| AD-77789 | A-156292 | UGGGGCAGGAACAGGAUUAdTdT | 609 | A-156293 | UAAUCCUGUUCCUGCCCCAdTdT | 677 | UGGGGCAGGAACAGGAUUC | 745 |
| AD-77790 | A-156294 | UCCUAUGGGGGCAAGUUUAdTdT | 610 | A-156295 | UAAACUUGCCCCCAUAGGAdTdT | 678 | UCCUAUGGGGGCAAGUUUG | 746 |
| AD-77791 | A-156296 | UUUGAUAGGAGCCAGUCCUdTdT | 611 | A-156297 | AGGACUGGCUCCUAUCAAAdTdT | 679 | UUUGAUAGGAGCCAGUCCU | 747 |
| AD-77792 | A-156298 | GUCCUUUGUGGGAGAGAUUdTdT | 612 | A-156299 | AAUCUCUCCCACAAAGGACdTdT | 680 | GUCCUUUGUGGGAGAGAUU | 748 |
| AD-77793 | A-156300 | AGAUUGGGGAUUUGUACAUdTdT | 613 | A-156301 | AUGUACAAAUCCCCAAUCUdTdT | 681 | AGAUUGGGGAUUUGUACAU | 749 |
| AD-77794 | A-156302 | UUUGUACAUGUGGGACUCUdTdT | 614 | A-156303 | AGAGUCCCACAUGUACAAAdTdT | 682 | UUUGUACAUGUGGGACUCU | 750 |
| AD-77795 | A-156304 | AUGUGGGACUCUGUGCUGAdTdT | 615 | A-156305 | UCAGCACAGAGUCCCACAUdTdT | 683 | AUGUGGGACUCUGUGCUGC | 751 |
| AD-77796 | A-156306 | CUGCCCCCAGAAAAUAUCAdTdT | 616 | A-156307 | UGAUAUUUUCUGGGGGCAGdTdT | 684 | CUGCCCCCAGAAAAUAUCC | 752 |
| AD-77797 | A-156308 | UAUCCUGUCUGCCUAUCAAdTdT | 617 | A-156309 | UUGAUAGGCAGACAGGAUAdTdT | 685 | UAUCCUGUCUGCCUAUCAG | 753 |
| AD-77798 | A-156310 | CCUAUCAGGGUACCCCUCUdTdT | 618 | A-156311 | AGAGGGGUACCCUGAUAGGdTdT | 686 | CCUAUCAGGGUACCCCUCU | 754 |
| AD-77799 | A-156312 | CUCUCCCUGCCAAUAUCCUdTdT | 619 | A-156313 | AGGAUAUUGGCAGGGAGAGdTdT | 687 | CUCUCCCUGCCAAUAUCCU | 755 |
| AD-77800 | A-156314 | UCCUGGACUGGCAGGCUCUdTdT | 620 | A-156315 | AGAGCCUGCCAGUCCAGGAdTdT | 688 | UCCUGGACUGGCAGGCUCU | 756 |
| AD-77801 | A-156316 | UGGCAGGCUCUGAACUAUAdTdT | 621 | A-156317 | UAUAGUUCAGAGCCUGCCAdTdT | 689 | UGGCAGGCUCUGAACUAUG | 757 |
| AD-77802 | A-156318 | UAUGAAAUCAGAGGAUAUAdTdT | 622 | A-156319 | UAUAUCCUCUGAUUUCAUAdTdT | 690 | UAUGAAAUCAGAGGAUAUG | 758 |
| AD-77803 | A-156320 | UAUGUCAUCAUCAAACCCUdTdT | 623 | A-156321 | AGGGUUUGAUGAUGACAUAdTdT | 691 | UAUGUCAUCAUCAAACCCU | 759 |
| AD-77804 | A-156322 | ACCCUUGGUGUGGGUCUGAdTdT | 624 | A-156323 | UCAGACCCACACCAAGGGUdTdT | 692 | ACCCUUGGUGUGGGUCUGA | 760 |
| AD-77805 | A-156324 | UGUGGGUCUGAGGUCUUGAdTdT | 625 | A-156325 | UCAAGACCUCAGACCCACAdTdT | 693 | UGUGGGUCUGAGGUCUUGA | 761 |
| AD-77806 | A-156326 | UUGACUCAACGAGAGCACUdTdT | 626 | A-156327 | AGUGCUCUCGUUGAGUCAAdTdT | 694 | UUGACUCAACGAGAGCACU | 762 |
| AD-77807 | A-156328 | GCACUUGAAAAUGAAAUGAdTdT | 627 | A-156329 | UCAUUUCAUUUUCAAGUGCdTdT | 695 | GCACUUGAAAAUGAAAUGA | 763 |
| AD-77808 | A-156330 | AAUGACUGUCUAAGAGAUAdTdT | 628 | A-156331 | UAUCUCUUAGACAGUCAUUdTdT | 696 | AAUGACUGUCUAAGAGAUC | 764 |
| AD-77809 | A-156332 | AGAUCUGGUCAAAGCAACUdTdT | 629 | A-156333 | AGUUGCUUUGACCAGAUCUdTdT | 697 | AGAUCUGGUCAAAGCAACU | 765 |
| AD-77810 | A-156334 | CAAAGCAACUGGAUACUAAdTdT | 630 | A-156335 | UUAGUAUCCAGUUGCUUUGdTdT | 698 | CAAAGCAACUGGAUACUAG | 766 |
| AD-77811 | A-156336 | CUAGAUCUUACAUCUGCAAdTdT | 631 | A-156337 | UUGCAGAUGUAAGAUCUAGdTdT | 699 | CUAGAUCUUACAUCUGCAG | 767 |
| AD-77812 | A-156338 | GCAGCUCUUUCUUCUUUGAdTdT | 632 | A-156339 | UCAAAGAAGAAAGAGCUGCdTdT | 700 | GCAGCUCUUUCUUCUUUGA | 768 |
| AD-77813 | A-156340 | UUGAAUUUCCUAUCUGUAUdTdT | 633 | A-156341 | AUACAGAUAGGAAAUUCAAdTdT | 701 | UUGAAUUUCCUAUCUGUAU | 769 |
| AD-77814 | A-156342 | CUAUCUGUAUGUCUGCCUAdTdT | 634 | A-156343 | UAGGCAGACAUACAGAUAGdTdT | 702 | CUAUCUGUAUGUCUGCCUA | 770 |
| AD-77815 | A-156344 | CCUAAUUAAAAAAAUAUAUdTdT | 635 | A-156345 | AUAUAUUUUUUUAAUUAGGdTdT | 703 | CCUAAUUAAAAAAAUAUAU | 771 |
| AD-77816 | A-156346 | UAUAUAUUGUAUUAUGCUAdTdT | 636 | A-156347 | UAGCAUAAUACAAUAUAUAdTdT | 704 | UAUAUAUUGUAUUAUGCUA | 772 |

TABLE 8
APCS Single Dose Screen in Cos7 cells

| | 10 nM avg [% | |
|---|---|---|
| | message | |
| Duplex ID | remaining] | stdev |
| AD-77749 | 55.2 | 5.0 |
| AD-77750 | 40.8 | 4.4 |
| AD-77751 | 78.6 | 6.4 |
| AD-77752 | 11.2 | 2.5 |
| AD-77753 | 13.0 | 3.2 |
| AD-77754 | 17.9 | 4.4 |
| AD-77755 | 20.1 | 3.3 |
| AD-77756 | 16.1 | 2.4 |
| AD-77757 | 13.2 | 1.6 |
| AD-77758 | 11.4 | 1.5 |
| AD-77759 | 9.5 | 1.0 |
| AD-77760 | 19.8 | 6.8 |
| AD-77761 | 4.8 | 1.0 |
| AD-77762 | 9.3 | 3.1 |
| AD-77763 | 24.6 | 6.2 |
| AD-77764 | 13.2 | 1.8 |
| AD-77765 | 11.0 | 1.1 |
| AD-77766 | 9.4 | 3.4 |
| AD-77767 | 10.2 | 1.8 |
| AD-77768 | 59.3 | 4.8 |
| AD-77769 | 13.2 | 1.5 |
| AD-77770 | 21.9 | 2.1 |
| AD-77771 | 21.3 | 5.2 |
| AD-77772 | 18.7 | 4.6 |
| AD-77773 | 11.0 | 2.0 |
| AD-77774 | 59.4 | 6.2 |
| AD-77775 | 12.2 | 1.2 |
| AD-77776 | 16.1 | 1.1 |
| AD-77777 | 10.6 | 1.3 |
| AD-77778 | 17.3 | 1.5 |
| AD-77779 | 30.4 | 2.2 |
| AD-77780 | 78.7 | 18.9 |
| AD-77781 | 38.2 | 5.4 |
| AD-77782 | 21.0 | 3.2 |
| AD-77783 | 12.3 | 7.1 |
| AD-77784 | 8.2 | 2.0 |
| AD-77785 | 14.2 | 2.6 |
| AD-77786 | 21.9 | 5.5 |
| AD-77787 | 39.3 | 3.4 |
| AD-77788 | 33.6 | 12.3 |
| AD-77789 | 35.9 | 6.6 |
| AD-77790 | 27.3 | 3.4 |
| AD-77791 | 77.0 | 8.1 |
| AD-77792 | 25.5 | 2.7 |
| AD-77793 | 29.1 | 3.4 |
| AD-77794 | 62.8 | 9.0 |
| AD-77795 | 19.6 | 3.7 |
| AD-77796 | 51.6 | 8.2 |
| AD-77797 | 29.7 | 2.7 |
| AD-77798 | 17.7 | 0.9 |
| AD-77799 | 33.1 | 4.4 |
| AD-77800 | 38.6 | 1.7 |
| AD-77801 | 20.4 | 2.0 |
| AD-77802 | 17.1 | 1.7 |
| AD-77803 | 78.0 | 4.6 |
| AD-77804 | 18.1 | 1.9 |
| AD-77805 | 10.8 | 1.7 |
| AD-77806 | 11.3 | 2.5 |
| AD-77807 | 10.3 | 1.7 |
| AD-77808 | 34.2 | 1.4 |
| AD-77809 | 25.5 | 11.9 |
| AD-77810 | 27.1 | 15.7 |
| AD-77811 | 31.6 | 14.4 |
| AD-77812 | 18.9 | 10.7 |
| AD-77813 | 13.6 | 6.8 |
| AD-77814 | 19.7 | 12.2 |
| AD-77815 | 27.5 | 7.5 |
| AD-77816 | 23.0 | 10.3 |

Informal Sequence Listing
>gi|206597534|ref|NM_001639.3| Homo sapiens
amyloid P component, serum (APCS), mRNA
SEQ ID NO: 1
GGGCATGAATATCAGACGCTAGGGGGACAGCCACTGTGTTGTCTGCTACC
CTCATCCTGGTCACTGCTTCTGCTATAACAGCCCTAGGCCAGGAATATGA
ACAAGCCGCTGCTTTGGATCTCTGTCCTCACCAGCCTCCTGGAAGCCTTT
GCTCACACAGACCTCAGTGGGAAGGTGTTTGTATTTCCTAGAGAATCTGT
TACTGATCATGTAAACTTGATCACACCGCTGGAGAAGCCTCTACAGAACT
TTACCTTGTGTTTTCGAGCCTATAGTGATCTCTCTCGTGCCTACAGCCTC
TTCTCCTACAATACCCAAGGCAGGGATAATGAGCTACTAGTTTATAAAGA
AAGAGTTGGAGAGTATAGTCTATACATTGGAAGACACAAAGTTACATCCA
AAGTTATCGAAAAGTTCCCGGCTCCAGTGCACATCTGTGTGAGCTGGGAG
TCCTCATCAGGTATTGCTGAATTTTGGATCAATGGGACACCTTTGGTGAA
AAAGGGTCTGCGACAGGGTTACTTTGTAGAAGCTCAGCCCAAGATTGTCC
TGGGGCAGGAACAGGATTCCTATGGGGGCAAGTTTGATAGGAGCCAGTCC
TTTGTGGGAGAGATTGGGGATTTGTACATGTGGGACTCTGTGCTGCCCCC
AGAAAATATCCTGTCTGCCTATCAGGGTACCCCTCTCCCTGCCAATATCC
TGGACTGGCAGGCTCTGAACTATGAAATCAGAGGATATGTCATCATCAAA
CCCTTGGTGTGGGTCTGAGGTCTTGACTCAACGAGAGCACTTGAAAATGA
AATGACTGTCTAAGAGATCTGGTCAAAGCAACTGGATACTAGATCTTACA
TCTGCAGCTCTTTCTTCTTTGAATTTCCTATCTGTATGTCTGCCTAATTA
AAAAAATATATATTGTATTATGCTACCTGCAAAAAAAAA
>gi|982224943|ref|XM_005541312.2| PREDICTED:
Macaca fascicularis amyloid P component, serum
(APCS), mRNA
SEQ ID NO: 2
AATAGCCTGAAGTCTAAGGGCGTGAATATCAGACGCTAGGGGGACAGCCA
CTGTGTTATCTGCTGCCCTCATCCTGGTCACTGCTCCTGCTATAATAGCC
CTAGGCCAGGAATATGAACAAGCTGCTGCTTTGGGTCTCTGTCCTCACCA
GCCTCCTGGAAGCCTTTGCTCACACAGACCTCAGTGGGAAGGTGTTTGTA
TTTCCTAGAGAATCTGTTACTGATCATGTAAACTTGATCACACAGCTGGA
GAAGCCTCTGCAGAACTTTACCTTGTGTTTTCGAGCCTACACTGATCTCT
CCCGTCCCTACAGCCTCTTCTCCTACAATACCCAGGGAAAGGATAATGAG
CTAGTAGTTTATAAAGAAAGAGTTGGAGATTATAGTCTCTACATTGGAAG
ACAAAAAGTTACATTCAAAGTTATTGAAAAGTTCCCGGCTCCAGTGCACA
TCTGTGTTAGCTGGGAGTCCTCATCAGGTATTGCTGAATTTTGGATCAAT
GGGACACCTTTGGTGAAAAAGGGTCTGCGACAGGGTTACTCTGTGGAAGC
TCATCCCAAGATTGTCCTGGGGCAGGAGCAGGATTCCTATGGCGGCAAGT
TTGATAAGAGCCAGTCTTTTGTGGGAGAGATTGGGGATTTGTACATGTGG
AACTCTGTACTGCCCCCAGAAGAGATCCTGTCTGCCTATCAGGGTACCCC
AGTCCCTGCCAATATCCTGGACTGGCGGGCTCTGAACTATGAAATCAAAG
GATATGTCATCATCAAACCCCTGGTGTGGGTCTGAGGTCTTGACTCAACA
AGATCACTTGAAAATGAAATGACCGTCTAAGAGATCTGCTCAAAGCAACT
GGATACTAGATCTTATACCTGCAGCTCTTTCTTCTTTGAATTCCCTATCT
GTATGTCTGCCGAATTAAAAACTGTATATTGTATTATGCTACCTGCATTT
GTTTAGTGCTTATCATAGTCCCATATCTTTATCTTATATCTACTACTTAT
CTATCTGCTACTTATCTGGTAATTGGTGTTTCATTATCCTGAACAATCAA
ATTGCCAAGTATGGGGAGGAAAACCTATAAGTAACTAGAAAGGTGTATCA
CAAAACCAGGGCACTCAATGAGCAGGACAGTGGCAATACTTAAAAGCTAC
TAACAATCATTTTAATAACGATTCAAAATATGTGTGGAATTGCAATCACA
ATTCTTCTGTTTTTCCAGCTACAAATCGATCAAAAAGATGTCTGAGGTTG
CATCAGGGAGACAACTATAATGAAATAAGTAAGCAATAGTTGAGAACCTA
ACAGCAAGTAATGAGACAGGAAGAATAAAACTAGAAGTCAGAATGAAAAC
CAAAAAAGTATGAGACTGGGATAGTTTTGTATGAAGACAAACATAACTTT
ATGTCTCAAAAACCTCAGTAGGACTGTACAATGCTTGATTTTCATAACGC
TGTCCTGATGTCATCAAAAAATGTTATACTCTGAATATTGCTTACATGAA
TATGCTGTCTGAAATTATTCCATGGATTCACACTTCTTACAGGACGTGAT
TTAAACCTCTAAATATGACATTGCCCTCCATAACCTGGTCCCACTTACTC
TCTGAAATGTACACAGAGAATACACACAGAATACTCTCCGAAATGGACTT
TCCATGTACATTTCAGATACAACTGTTAGCAGAGCAAGTGACATCCTAAC
TATCACACTGCAAAATAATTGTCAGCTGCTATTACTAGTAGTTATTTTTA
TGGTTATGAAAAGCATGGAACACAGTGCCTGGCTCATCATCAACAGATAT
GAGTTGCATTCCCAGGGAAGCAAGGATCCCAGAGGGAGTTCAGGCTATAT
ATATTTGAAATAAGACAGGCTTTTCTCACTGATAATAAGTAGAGCATGAT
GTCAGTGGAATCAGAAAGATAGCATCCAGAACAGTTTCAGGATGGTAACC
AATGTGATGATTTCAAACTCATGAGGCCATTTGGCCAGAATGAACAGAGG
CAGTAGCCAGATATGAAGAAATAGGATAGAATCTAGAAACTCCATAATGG
GGCAATGGGGTAGAAGCAGAGAGGACCAGACAGCACCTGTGAAGACTTGC
TGAAGTACTTAAATGGAGCAGCAGGGGCTTCATAAGAACATTTCAACCTC
ATTTCTGGTGAGGTGGTAAGATGGTTTGGATATGGTTTGTTTGCCTCCAC
CAAACTTCATCTTGAACTTTTATTCTCAATATGGTGTTGTTGGAAGGTGA
GTCCTAGTGAAAGGCATTTGAGCTATGGGGGTGGGTCTCTCATGAATGTT
TTGGTGCAGTTCTCACGGTAATGAGTGAGTTCTCACTCTTATGAAAGTAC
ATTAACTCTTGTGGGATCAGATTGGTTCTTGCCAGATTTAGCTGTTATAA
AACCAGGGTGTCCTTTAGGTTTTGTTTTCTTTGCACATGTTCACTTCCCT
TTTGACTTTCTCCACCATGTTTTGATACAACACAAAAACCCTCACCAGAA
GCCAGAGGCGTGATCTTGAACTTCTCAGCCTGCAGAGCAATGAGCTAAAT
AAACCTCTTTT
>gi|226958496|ref|NM_011318.2| Mus musculus serum
amyloid P-component (Apcs), mRNA
SEQ ID NO: 3
GCAGAACGAAGGAGGATCTGGGAGTACCTCACATGGTATTACTTCTCTCC
ACCCTTCATTGTCATCCAAGGTACATACAAAACCTGAAATCTGAAAAGCA
TAGGCAGACACCACACTTTTGTTCCACACCCAAGTAACAGCTGCTGCTGT
CATACCCTGGACCAAGCATGGACAAGCTACTGCTTTGGATGTTTGTCTTC
ACCAGCCTTCTTTCAGAAGCCTTTTGTCAGACAGACCTCAAGAGGAAAGT
ATTTGTGTTCCCCAGAGAATCTGAAACTGATCATGTGAAGCTGATCCCAC
ATCTAGAGAAACCTCTGCAGAATTTTACACTGTGTTTCCGAACCTACAGT
GACCTTTCCCGCTCTCAGAGTCTTTTCTCCTACAGTGTCAAGGGCAGAGA
CAATGAGCTACTAATTTATAAAGAAAAAGTTGGAGAATACAGCCTATACA
TCGGACAATCAAAAGTCACAGTCCGTGGTATGGAAGAATACCTTTCTCCA
GTACACCTATGTACCACTTGGGAGTCCTCCTCTGGCATTGTTGAATTTTG
GGTCAATGGAAAGCCTTGGGTAAAAAAGTCTCTGCAGAGGGAATACACTG
TGAAAGCCCCACCCAGTATAGTCCTGGGACAGGAGCAGGATAACTACGGA
GGAGGGTTTCAAAGGTCACAGTCCTTTGTAGGAGAGTTTTCAGATTTATA
CATGTGGGACTATGTGCTGACCCCACAAGACATTCTATTTGTGTACAGAG
ATTCCCCTGTCAATCCTAATATTTTGAATTGGCAGGCTCTTAACTATGAA
ATAAATGGCTACGTAGTCATCAGGCCCCGTGTCTGGGATTGAGATCTTAC
AACAAAACCTCATGGACATCAGATGGCCGATGTGTAAGAGGTCAAGGCAG
CAGAATTCACTCTATCTGGAGCTTTTTCTTCTTTGTGAACATCTTGTATA
CATATCTGCCAAATAAAAATCCTCTCCAATTCCAAAAAAAAAAAAAAAAA
AAAAAAAAAAAA
>gi|148747487|ref|NM_017170.2| Rattus norvegicus
amyloid P component, serum (Apcs), mRNA
SEQ ID NO: 4
ATGGACAAGCTGCTGCTTTGGATGTCTGTCTTCACCAGCCTTCTTTCAGA
AGCCTTTGCTCAGACAGACCTCAATCAGAAGGTATTTGTGTTCCCCAGAG
AATCTGAAACTGATTATGTGAAGCTGATCCCATGGCTAGAAAAACCGCTG
CAGAATTTTACACTGTGTTTCCGAGCCTACAGTGACCTTTCCCGCTCTCA
GAGTCTTTTCTCCTACAGTGTCAACAGCAGAGACAATGAGCTACTAATTT
ATAAAGACAAAGTTGGACAATATAGCCTATACATTGGAAATTCAAAAGTC
ACAGTCCGTGGTTTAGAAGAATTCCCTTCTCCAATACATTTCTGTACCAG
CTGGGAGTCCTCCTCTGGTATTGCTGAATTTTGGGTCAATGGAAAGCCTT
GGGTAAAAAAGGGTTTGCAGAAGGGATACACTGTGAAATCCTCACCCAGT
ATTGTCCTGGGACAGGAGCAGGATACGTATGGAGGAGGGTTTGATAAGAC
ACAGTCCTTTGTGGGAGAGATTGCAGATTTGTACATGTGGGACAGTGTGC
TGACCCCAGAGAACATTCATTCTGTGGACAGAGGTTTCCCACCCAATCCT
AATATTTTGGATTGGCGGGCCCTGAATTATGAAATAAATGGTTATGTAGT
CATCAAGCCCCGTATGTGGGACAACAAAAGCTCATGA
Reverse complement of SEQ ID NO: 1
SEQ ID NO: 5
TTTTTTTTTTTTTTTTTTTTTTTTTTTTTTGCAGGTAGCATAATACAATA
TATATTTTTTTAATTAGGCAGACATACAGATAGGAAATTCAAAGAAGAAA
GAGCTGCAGATGTAAGATCTAGTATCCAGTTGCTTTGACCAGATCTCTTA
GACAGTCATTTCATTTTCAAGTGCTCTCGTTGAGTCAAGACCTCAGACCC
ACACCAAGGGTTTGATGATGACATATCCTCTGATTTCATAGTTCAGAGCC
TGCCAGTCCAGGATATTGGCAGGGAGAGGGGTACCCTGATAGGCAGACAG
GATATTTTCTGGGGGCAGCACAGAGTCCCACATGTACAAATCCCCAATCT
CTCCCACAAAGGACTGGCTCCTATCAAACTTGCCCCCATAGGAATCCTGT
TCCTGCCCCAGGACAATCTTGGGCTGAGCTTCTACAAAGTAACCCTGTCG
CAGACCCTTTTTCACCAAAGGTGTCCCATTGATCCAAAATTCAGCAATAC
CTGATGAGGACTCCCAGCTCACACAGATGTGCACTGGAGCCGGGAACTTT
TCGATAACTTTGGATGTAACTTTGTGTCTTCCAATGTATAGACTATACTC
TCCAACTCTTTCTTTATAAACTAGTAGCTCATTATCCCTGCCTTGGGTAT
TGTAGGAGAAGAGGCTGTAGGCACGAGAGAGATCACTATAGGCTCGAAAA
CACAAGGTAAAGTTCTGTAGAGGCTTCTCCAGCGGTGTGATCAAGTTTAC
ATGATCAGTAACAGATTCTCTAGGAAATACAAACACCTTCCCACTGAGGT
CTGTGTGAGCAAAGGCTTCCAGGAGGCTGGTGAGGACAGAGATCCAAAGC
AGCGGCTTGTTCATATTCCTGGCCTAGGGCTGTTATAGCAGAAGCAGTGA
CCAGGATGAGGGTAGCAGACAACACAGTGGCTGTCCCCCTAGCGTCTGAT
ATTCATGCCC
Reverse complement of SEQ ID NO: 2
SEQ ID NO: 6
AATAGCCTGAAGTCTAAGGGCGTGAATATCAGACGCTAGGGGGACAGCCA
CTGTGTTATCTGCTGCCCTCATCCTGGTCACTGCTCCTGCTATAATAGCC
CTAGGCCAGGAATATGAACAAGCTGCTGCTTTGGGTCTCTGTCCTCACCA
GCCTCCTGGAAGCCTTTGCTCACACAGACCTCAGTGGGAAGGTGTTTGTA
TTTCCTAGAGAATCTGTTACTGATCATGTAAACTTGATCACACAGCTGGA
GAAGCCTCTGCAGAACTTTACCTTGTGTTTTCGAGCCTACACTGATCTCT
CCCGTCCCTACAGCCTCTTCTCCTACAATACCCAGGGAAAGGATAATGAG
CTAGTAGTTTATAAAGAAAGAGTTGGAGATTATAGTCTCTACATTGGAAG
ACAAAAAGTTACATTCAAAGTTATTGAAAAGTTCCCGGCTCCAGTGCACA
TCTGTGTTAGCTGGGAGTCCTCATCAGGTATTGCTGAATTTTGGATCAAT
GGGACACCTTTGGTGAAAAAGGGTCTGCGACAGGGTTACTCTGTGGAAGC
TCATCCCAAGATTGTCCTGGGGCAGGAGCAGGATTCCTATGGCGGCAAGT
TTGATAAGAGCCAGTCTTTTGTGGGAGAGATTGGGGATTTGTACATGTGG
AACTCTGTACTGCCCCCAGAAGAGATCCTGTCTGCCTATCAGGGTACCCC
AGTCCCTGCCAATATCCTGGACTGGCGGGCTCTGAACTATGAAATCAAAG
GATATGTCATCATCAAACCCCTGGTGTGGGTCTGAGGTCTTGACTCAACA
AGATCACTTGAAAATGAAATGACCGTCTAAGAGATCTGCTCAAAGCAACT
GGATACTAGATCTTATACCTGCAGCTCTTTCTTCTTTGAATTCCCTATCT
GTATGTCTGCCGAATTAAAAACTGTATATTGTATTATGCTACCTGCATTT
GTTTAGTGCTTATCATAGTCCCATATCTTTATCTTATATCTACTACTTAT
CTATCTGCTACTTATCTGGTAATTGGTGTTTCATTATCCTGAACAATCAA
ATTGCCAAGTATGGGGAGGAAAACCTATAAGTAACTAGAAAGGTGTATCA
CAAAACCAGGGCACTCAATGAGCAGGACAGTGGCAATACTTAAAAGCTAC
TAACAATCATTTTAATAACGATTCAAAATATGTGTGGAATTGCAATCACA
ATTCTTCTGTTTTTCCAGCTACAAATCGATCAAAAAGATGTCTGAGGTTG
CATCAGGGAGACAACTATAATGAAATAAGTAAGCAATAGTTGAGAACCTA
ACAGCAAGTAATGAGACAGGAAGAATAAAACTAGAAGTCAGAATGAAAAC
CAAAAAAGTATGAGACTGGGATAGTTTTGTATGAAGACAAACATAACTTT
ATGTCTCAAAAACCTCAGTAGGACTGTACAATGCTTGATTTTCATAACGC
TGTCCTGATGTCATCAAAAAATGTTATACTCTGAATATTGCTTACATGAA
TATGCTGTCTGAAATTATTCCATGGATTCACACTTCTTACAGGACGTGAT
TTAAACCTCTAAATATGACATTGCCCTCCATAACCTGGTCCCACTTACTC
TCTGAAATGTACACAGAGAATACACACAGAATACTCTCCGAAATGGACTT
TCCATGTACATTTCAGATACAACTGTTAGCAGAGCAAGTGACATCCTAAC
TATCACACTGCAAAATAATTGTCAGCTGCTATTACTAGTAGTTATTTTTA
TGGTTATGAAAAGCATGGAACACAGTGCCTGGCTCATCATCAACAGATAT
GAGTTGCATTCCCAGGGAAGCAAGGATCCCAGAGGGAGTTCAGGCTATAT
ATATTTGAAATAAGACAGGCTTTTCTCACTGATAATAAGTAGAGCATGAT
GTCAGTGGAATCAGAAAGATAGCATCCAGAACAGTTTCAGGATGGTAACC
AATGTGATGATTTCAAACTCATGAGGCCATTTGGCCAGAATGAACAGAGG
CAGTAGCCAGATATGAAGAAATAGGATAGAATCTAGAAACTCCATAATGG
GGCAATGGGGTAGAAGCAGAGAGGACCAGACAGCACCTGTGAAGACTTGC
TGAAGTACTTAAATGGAGCAGCAGGGGCTTCATAAGAACATTTCAACCTC
ATTTCTGGTGAGGTGGTAAGATGGTTTGGATATGGTTTGTTTGCCTCCAC
CAAACTTCATCTTGAACTTTTATTCTCAATATGGTGTTGTTGGAAGGTGA
GTCCTAGTGAAAGGCATTTGAGCTATGGGGGTGGGTCTCTCATGAATGTT
TTGGTGCAGTTCTCACGGTAATGAGTGAGTTCTCACTCTTATGAAAGTAC
ATTAACTCTTGTGGGATCAGATTGGTTCTTGCCAGATTTAGCTGTTATAA
AACCAGGGTGTCCTTTAGGTTTTGTTTTCTTTGCACATGTTCACTTCCCT
TTTGACTTTCTCCACCATGTTTTGATACAACACAAAAACCCTCACCAGAA
GCCAGAGGCGTGATCTTGAACTTCTCAGCCTGCAGAGCAATGAGCTAAAT
AAACCTCTTTT
Reverse complement of SEQ ID NO: 3
SEQ ID NO: 7
TTTTTTTTTTTTTTTTTTTTTTTTTTTTTGGAATTGGAGAGGATTTTTAT
TTGGCAGATATGTATACAAGATGTTCACAAAGAAGAAAAAGCTCCAGATA
GAGTGAATTCTGCTGCCTTGACCTCTTACACATCGGCCATCTGATGTCCA
TGAGGTTTTGTTGTAAGATCTCAATCCCAGACACGGGGCCTGATGACTAC
GTAGCCATTTATTTCATAGTTAAGAGCCTGCCAATTCAAAATATTAGGAT
TGACAGGGGAATCTCTGTACACAAATAGAATGTCTTGTGGGGTCAGCACA
TAGTCCCACATGTATAAATCTGAAAACTCTCCTACAAAGGACTGTGACCT
TTGAAACCCTCCTCCGTAGTTATCCTGCTCCTGTCCCAGGACTATACTGG
GTGGGGCTTTCACAGTGTATTCCCTCTGCAGAGACTTTTTTACCCAAGGC
TTTCCATTGACCCAAAATTCAACAATGCCAGAGGAGGACTCCCAAGTGGT
ACATAGGTGTACTGGAGAAAGGTATTCTTCCATACCACGGACTGTGACTT
TTGATTGTCCGATGTATAGGCTGTATTCTCCAACTTTTTCTTTATAAATT
AGTAGCTCATTGTCTCTGCCCTTGACACTGTAGGAGAAAAGACTCTGAGA
GCGGGAAAGGTCACTGTAGGTTCGGAAACACAGTGTAAAATTCTGCAGAG
GTTTCTCTAGATGTGGGATCAGCTTCACATGATCAGTTTCAGATTCTCTG
GGGAACACAAATACTTTCCTCTTGAGGTCTGTCTGACAAAAGGCTTCTGA
AAGAAGGCTGGTGAAGACAAACATCCAAAGCAGTAGCTTGTCCATGCTTG
GTCCAGGGTATGACAGCAGCAGCTGTTACTTGGGTGTGGAACAAAAGTGT
GGTGTCTGCCTATGCTTTTCAGATTTCAGGTTTTGTATGTACCTTGGATG
ACAATGAAGGGTGGAGAGAAGTAATACCATGTGAGGTACTCCCAGATCCT
CCTTCGTTCTGC
Reverse complement of SEQ ID NO: 4
SEQ ID NO: 8
TCATGAGCTTTTGTTGTCCCACATACGGGGCTTGATGACTACATAACCAT
TTATTTCATAATTCAGGGCCCGCCAATCCAAAATATTAGGATTGGGTGGG
AAACCTCTGTCCACAGAATGAATGTTCTCTGGGGTCAGCACACTGTCCCA
CATGTACAAATCTGCAATCTCTCCCACAAAGGACTGTGTCTTATCAAACC
CTCCTCCATACGTATCCTGCTCCTGTCCCAGGACAATACTGGGTGAGGAT
TTCACAGTGTATCCCTTCTGCAAACCCTTTTTTACCCAAGGCTTTCCATT
GACCCAAAATTCAGCAATACCAGAGGAGGACTCCCAGCTGGTACAGAAAT
GTATTGGAGAAGGGAATTCTTCTAAACCACGGACTGTGACTTTTGAATTT
CCAATGTATAGGCTATATTGTCCAACTTTGTCTTTATAAATTAGTAGCTC
ATTGTCTCTGCTGTTGACACTGTAGGAGAAAAGACTCTGAGAGCGGGAAA
GGTCACTGTAGGCTCGGAAACACAGTGTAAAATTCTGCAGCGGTTTTTCT
AGCCATGGGATCAGCTTCACATAATCAGTTTCAGATTCTCTGGGGAACAC
AAATACCTTCTGATTGAGGTCTGTCTGAGCAAAGGCTTCTGAAAGAAGGC
TGGTGAAGACAGACATCCAAAGCAGCAGCTTGTCCAT

The application's sequence listing, which the Patent Office published only in electronic form, follows.

SEQUENCE LISTING (960 sequences)

SEQ ID NO: 1 - DNA, 960 bp, Homo sapiens
  source 1..960: mol_type = genomic DNA
gggcatgaatatcagacgctagggggacagccactgtgttgtctgctaccctcatcctggtcactgcttctgctataacagccctaggccaggaatatgaacaagccgctgctttggatctctgtcctcaccagcctcctggaagcctttgctcacacagacctcagtgggaaggtgtttgtatttcctagagaatctgttactgatcatgtaaacttgatcacaccgctggagaagcctctacagaactttaccttgtgttttcgagcctatagtgatctctctcgtgcctacagcctcttctcctacaatacccaaggcagggataatgagctactagtttataaagaaagagttggagagtatagtctatacattggaagacacaaagttacatccaaagttatcgaaaagttcccggctccagtgcacatctgtgtgagctgggagtcctcatcaggtattgctgaattttggatcaatgggacacctttggtgaaaaagggtctgcgacagggttactttgtagaagctcagcccaagattgtcctggggcaggaacaggattcctatgggggcaagtttgataggagccagtcctttgtgggagagattggggatttgtacatgtgggactctgtgctgcccccagaaaatatcctgtctgcctatcagggtacccctctccctgccaatatcctggactggcaggctctgaactatgaaatcagaggatatgtcatcatcaaacccttggtgtgggtctgaggtcttgactcaacgagagcacttgaaaatgaaatgactgtctaagagatctggtcaaagcaactggatactagatcttacatctgcagctctttcttctttgaatttcctatctgtatgtctgcctaattaaaaaaatatatattgtattatgctacctgcaaaaaaaaaaaaaaaaaaaaaaaaaaaaaa

SEQ ID NO: 2 - DNA, 2561 bp, Macaca fascicularis
  source 1..2561: mol_type = genomic DNA
aatagcctgaagtctaagggcgtgaatatcagacgctagggggacagccactgtgttatctgctgccctcatcctggtcactgctcctgctataatagccctaggccaggaatatgaacaagctgctgctttgggtctctgtcctcaccagcctcctggaagcctttgctcacacagacctcagtgggaaggtgtttgtatttcctagagaatctgttactgatcatgtaaacttgatcacacagctggagaagcctctgcagaactttaccttgtgttttcgagcctacactgatctctcccgtccctacagcctcttctcctacaatacccagggaaaggataatgagctagtagtttataaagaaagagttggagattatagtctctacattggaagacaaaaagttacattcaaagttattgaaaagttcccggctccagtgcacatctgtgttagctgggagtcctcatcaggtattgctgaattttggatcaatgggacacctttggtgaaaaagggtctgcgacagggttactctgtggaagctcatcccaagattgtcctggggcaggagcaggattcctatggcggcaagtttgataagagccagtcttttgtgggagagattggggatttgtacatgtggaactctgtactgcccccagaagagatcctgtctgcctatcagggtaccccagtccctgccaatatcctggactggcgggctctgaactatgaaatcaaaggatatgtcatcatcaaacccctggtgtgggtctgaggtcttgactcaacaagatcacttgaaaatgaaatgaccgtctaagagatctgctcaaagcaactggatactagatcttatacctgcagctctttcttctttgaattccctatctgtatgtctgccgaattaaaaactgtatattgtattatgctacctgcatttgtttagtgcttatcatagtcccatatctttatcttatatctactacttatctatctgctacttatctggtaattggtgtttcattatcctgaacaatcaaattgccaagtatggggaggaaaacctataagtaactagaaaggtgtatcacaaaaccagggcactcaatgagcaggacagtggcaatacttaaaagctactaacaatcattttaataacgattcaaaatatgtgtggaattgcaatcacaattcttctgtttttccagctacaaatcgatcaaaaagatgtctgaggttgcatcagggagacaactataatgaaataagtaagcaatagttgagaacctaacagcaagtaatgagacaggaagaataaaactagaagtcagaatgaaaaccaaaaaagtatgagactgggatagttttgtatgaagacaaacataactttatgtctcaaaaacctcagtaggactgtacaatgcttgattttcataacgctgtcctgatgtcatcaaaaaatgttatactctgaatattgcttacatgaatatgctgtctgaaattattccatggattcacacttcttacaggacgtgatttaaacctctaaatatgacattgccctccataacctggtcccacttactctctgaaatgtacacagagaatacacacagaatactctccgaaatggactttccatgtacatttcagatacaactgttagcagagcaagtgacatcctaactatcacactgcaaaataattgtcagctgctattactagtagttatttttatggttatgaaaagcatggaacacagtgcctggctcatcatcaacagatatgagttgcattcccagggaagcaaggatcccagagggagttcaggctatatatatttgaaataagacaggcttttctcactgataataagtagagcatgatgtcagtggaatcagaaagatagcatccagaacagtttcaggatggtaaccaatgtgatgatttcaaactcatgaggccatttggccagaatgaacagaggcagtagccagatatgaagaaataggatagaatctagaaactccataatggggcaatggggtagaagcagagaggaccagacagcacctgtgaagacttgctgaagtacttaaatggagcagcaggggcttcataagaacatttcaacctcatttctggtgaggtggtaagatggtttggatatggtttgtttgcctccaccaaacttcatcttgaacttttattctcaatatggtgttgttggaaggtgagtcctagtgaaaggcatttgagctatgggggtgggtctctcatgaatgttttggtgcagttctcacggtaatgagtgagttctcactcttatgaaagtacattaactcttgtgggatcagattggttcttgccagatttagctgttataaaaccagggtgtcctttaggttttgttttctttgcacatgttcacttcccttttgactttctccaccatgttttgatacaacacaaaaaccctcaccagaagccagaggcgtgatcttgaacttctcagcctgcagagcaatgagctaaataaacctctttt

SEQ ID NO: 3 - DNA, 1012 bp, Mus musculus
  source 1..1012: mol_type = genomic DNA
gcagaacgaaggaggatctgggagtacctcacatggtattacttctctccacccttcattgtcatccaaggtacatacaaaacctgaaatctgaaaagcataggcagacaccacacttttgttccacacccaagtaacagctgctgctgtcataccctggaccaagcatggacaagctactgctttggatgtttgtcttcaccagccttctttcagaagccttttgtcagacagacctcaagaggaaagtatttgtgttccccagagaatctgaaactgatcatgtgaagctgatcccacatctagagaaacctctgcagaattttacactgtgtttccgaacctacagtgacctttcccgctctcagagtcttttctcctacagtgtcaagggcagagacaatgagctactaatttataaagaaaaagttggagaatacagcctatacatcggacaatcaaaagtcacagtccgtggtatggaagaatacctttctccagtacacctatgtaccacttgggagtcctcctctggcattgttgaattttgggtcaatggaaagccttgggtaaaaaagtctctgcagagggaatacactgtgaaagccccacccagtatagtcctgggacaggagcaggataactacggaggagggtttcaaaggtcacagtcctttgtaggagagttttcagatttatacatgtgggactatgtgctgaccccacaagacattctatttgtgtacagagattcccctgtcaatcctaatattttgaattggcaggctcttaactatgaaataaatggctacgtagtcatcaggccccgtgtctgggattgagatcttacaacaaaacctcatggacatcagatggccgatgtgtaagaggtcaaggcagcagaattcactctatctggagctttttcttctttgtgaacatcttgtatacatatctgccaaataaaaatcctctccaattccaaaaaaaaaaaaaaaaaaaaaaaaaaaaa

SEQ ID NO: 4 - DNA, 687 bp, Rattus norvegicus
  source 1..687: mol_type = genomic DNA
atggacaagctgctgctttggatgtctgtcttcaccagccttctttcagaagcctttgctcagacagacctcaatcagaaggtatttgtgttccccagagaatctgaaactgattatgtgaagctgatcccatggctagaaaaaccgctgcagaattttacactgtgtttccgagcctacagtgacctttcccgctctcagagtcttttctcctacagtgtcaacagcagagacaatgagctactaatttataaagacaaagttggacaatatagcctatacattggaaattcaaaagtcacagtccgtggtttagaagaattcccttctccaatacatttctgtaccagctgggagtcctcctctggtattgctgaattttgggtcaatggaaagccttgggtaaaaaagggtttgcagaagggatacactgtgaaatcctcacccagtattgtcctgggacaggagcaggatacgtatggaggagggtttgataagacacagtcctttgtgggagagattgcagatttgtacatgtgggacagtgtgctgaccccagagaacattcattctgtggacagaggtttcccacccaatcctaatattttggattggcgggccctgaattatgaaataaatggttatgtagtcatcaagccccgtatgtgggacaacaaaagctcatga

SEQ ID NO: 5 - DNA, 960 bp, Homo sapiens
  source 1..960: mol_type = genomic DNA
ttttttttttttttttttttttttttttttgcaggtagcataatacaatatatatttttttaattaggcagacatacagataggaaattcaaagaagaaagagctgcagatgtaagatctagtatccagttgctttgaccagatctcttagacagtcatttcattttcaagtgctctcgttgagtcaagacctcagacccacaccaagggtttgatgatgacatatcctctgatttcatagttcagagcctgccagtccaggatattggcagggagaggggtaccctgataggcagacaggatattttctgggggcagcacagagtcccacatgtacaaatccccaatctctcccacaaaggactggctcctatcaaacttgcccccataggaatcctgttcctgccccaggacaatcttgggctgagcttctacaaagtaaccctgtcgcagaccctttttcaccaaaggtgtcccattgatccaaaattcagcaatacctgatgaggactcccagctcacacagatgtgcactggagccgggaacttttcgataactttggatgtaactttgtgtcttccaatgtatagactatactctccaactctttctttataaactagtagctcattatccctgccttgggtattgtaggagaagaggctgtaggcacgagagagatcactataggctcgaaaacacaaggtaaagttctgtagaggcttctccagcggtgtgatcaagtttacatgatcagtaacagattctctaggaaatacaaacaccttcccactgaggtctgtgtgagcaaaggcttccaggaggctggtgaggacagagatccaaagcagcggcttgttcatattcctggcctagggctgttatagcagaagcagtgaccaggatgagggtagcagacaacacagtggctgtccccctagcgtctgatattcatgccc

SEQ ID NO: 6 - DNA, 2561 bp, Macaca fascicularis; identical to SEQ ID NO: 2
  source 1..2561: mol_type = genomic DNA

SEQ ID NO: 7 - DNA, 1012 bp, Mus musculus
  source 1..1012: mol_type = genomic DNA
tttttttttttttttttttttttttttttggaattggagaggatttttatttggcagatatgtatacaagatgttcacaaagaagaaaaagctccagatagagtgaattctgctgccttgacctcttacacatcggccatctgatgtccatgaggttttgttgtaagatctcaatcccagacacggggcctgatgactacgtagccatttatttcatagttaagagcctgccaattcaaaatattaggattgacaggggaatctctgtacacaaatagaatgtcttgtggggtcagcacatagtcccacatgtataaatctgaaaactctcctacaaaggactgtgacctttgaaaccctcctccgtagttatcctgctcctgtcccaggactatactgggtggggctttcacagtgtattccctctgcagagacttttttacccaaggctttccattgacccaaaattcaacaatgccagaggaggactcccaagtggtacataggtgtactggagaaaggtattcttccataccacggactgtgacttttgattgtccgatgtataggctgtattctccaactttttctttataaattagtagctcattgtctctgcccttgacactgtaggagaaaagactctgagagcgggaaaggtcactgtaggttcggaaacacagtgtaaaattctgcagaggtttctctagatgtgggatcagcttcacatgatcagtttcagattctctggggaacacaaatactttcctcttgaggtctgtctgacaaaaggcttctgaaagaaggctggtgaagacaaacatccaaagcagtagcttgtccatgcttggtccagggtatgacagcagcagctgttacttgggtgtggaacaaaagtgtggtgtctgcctatgcttttcagatttcaggttttgtatgtaccttggatgacaatgaagggtggagagaagtaataccatgtgaggtactcccagatcctccttcgttctgc

SEQ ID NO: 8 - DNA, 687 bp, Rattus norvegicus
  source 1..687: mol_type = genomic DNA
tcatgagcttttgttgtcccacatacggggcttgatgactacataaccatttatttcataattcagggcccgccaatccaaaatattaggattgggtgggaaacctctgtccacagaatgaatgttctctggggtcagcacactgtcccacatgtacaaatctgcaatctctcccacaaaggactgtgtcttatcaaaccctcctccatacgtatcctgctcctgtcccaggacaatactgggtgaggatttcacagtgtatcccttctgcaaacccttttttacccaaggctttccattgacccaaaattcagcaataccagaggaggactcccagctggtacagaaatgtattggagaagggaattcttctaaaccacggactgtgacttttgaatttccaatgtataggctatattgtccaactttgtctttataaattagtagctcattgtctctgctgttgacactgtaggagaaaagactctgagagcgggaaaggtcactgtaggctcggaaacacagtgtaaaattctgcagcggtttttctagccatgggatcagcttcacataatcagtttcagattctctggggaacacaaataccttctgattgaggtctgtctgagcaaaggcttctgaaagaaggctggtgaagacagacatccaaagcagcagcttgtccat

SEQ ID NO: 9 - protein, 16 aa, unidentified
  REGION 1..16: note = source = /note="Description of Unknown: RFGF peptide"
AAVALLPAVLLALLAP

SEQ ID NO: 10 - protein, 11 aa, unidentified
  REGION 1..11: note = source = /note="Description of Unknown: RFGF analogue peptide"
AALLPVLLAAP

SEQ ID NO: 11 - protein, 13 aa, Human immunodeficiency virus
GRKKRRQRRRPPQ

SEQ ID NO: 12 - protein, 16 aa, Drosophila sp.
RQIKIWFQNRRMKWKK

SEQ ID NO: 13 - RNA, 21 nt, synthetic construct
  source 1..21: mol_type = other RNA
actgcttctgctataacagca

SEQ ID NO: 14 - RNA, 21 nt, synthetic construct
  source 1..21: mol_type = other RNA
tatgaacaagccgctgcttta

SEQ ID NO: 15 - RNA, 21 nt, synthetic construct
  source 1..21: mol_type = other RNA
cagtgggaaggtgtttgtata

SEQ ID NO: 16 - RNA, 21 nt, synthetic construct
  source 1..21: mol_type = other RNA
gtgtttgtatttcctagagaa

SEQ ID NO: 17 - RNA, 21 nt, synthetic construct
  source 1..21: mol_type = other RNA
tctgttactgatcatgtaaaa

SEQ ID NO: 18 - RNA, 21 nt, synthetic construct
  source 1..21: mol_type = other RNA
tctgttactgatcatgtaaaa

SEQ ID NO: 19 - RNA, 21 nt, synthetic construct
  source 1..21: mol_type = other RNA
gttactgatcatgtaaactta

SEQ ID NO: 20 - RNA, 21 nt, synthetic construct
  source 1..21: mol_type = other RNA
tactgatcatgtaaacttgaa

SEQ ID NO: 21 - RNA, 21 nt, synthetic construct
  source 1..21: mol_type = other RNA
atcatgtaaacttgatcacaa

SEQ ID NO: 22 - RNA, 21 nt, synthetic construct
  source 1..21: mol_type = other RNA
tcatgtaaacttgatcacaca

SEQ ID NO: 23 - RNA, 21 nt, synthetic construct
  source 1..21: mol_type = other RNA
ctctacagaactttaccttga

SEQ ID NO: 24 - RNA, 21 nt, synthetic construct
  source 1..21: mol_type = other RNA
actttaccttgtgttttcgaa

SEQ ID NO: 25 - RNA, 21 nt, synthetic construct
  source 1..21: mol_type = other RNA
gttttcgagcctatagtgata

SEQ ID NO: 26 - RNA, 21 nt, synthetic construct
  source 1..21: mol_type = other RNA
gaaactgatcatgtgaagcta

SEQ ID NO: 27 - RNA, 21 nt, synthetic construct
  source 1..21: mol_type = other RNA
acctctgcagaattttacaca

SEQ ID NO: 28 - RNA, 21 nt, synthetic construct
  source 1..21: mol_type = other RNA
gcagaattttacactgtgtta

SEQ ID NO: 29 - RNA, 21 nt, synthetic construct
  source 1..21: mol_type = other RNA
cagaattttacactgtgttta

SEQ ID NO: 30 - RNA, 21 nt, synthetic construct
  source 1..21: mol_type = other RNA
taatgagctactagtttataa

SEQ ID NO: 31 - RNA, 21 nt, synthetic construct
  source 1..21: mol_type = other RNA
aatgagctactagtttataaa

SEQ ID NO: 32 - RNA, 21 nt, synthetic construct
  source 1..21: mol_type = other RNA
atgagctactagtttataaaa

SEQ ID NO: 33 - RNA, 21 nt, synthetic construct
  source 1..21: mol_type = other RNA
tgagctactagtttataaaga

SEQ ID NO: 34 - RNA, 21 nt, synthetic construct
  source 1..21: mol_type = other RNA
gagctactagtttataaagaa

SEQ ID NO: 35 - RNA, 21 nt, synthetic construct
  source 1..21: mol_type = other RNA
agctactagtttataaagaaa

SEQ ID NO: 36 - RNA, 21 nt, synthetic construct
  source 1..21: mol_type = other RNA
tgtttccgaacctacagtgaa

SEQ ID NO: 37 - RNA, 21 nt, synthetic construct
  source 1..21: mol_type = other RNA
ctactagtttataaagaaaga

SEQ ID NO: 38 - RNA, 21 nt, synthetic construct
  source 1..21: mol_type = other RNA
ccgaacctacagtgaccttta

SEQ ID NO: 39 - RNA, 21 nt, synthetic construct
  source 1..21: mol_type = other RNA
gtttataaagaaagagttgga

SEQ ID NO: 40 - RNA, 21 nt, synthetic construct
  source 1..21: mol_type = other RNA
taaagaaagagttggagagta

SEQ ID NO: 41 - RNA, 21 nt, synthetic construct
  source 1..21: mol_type = other RNA
gttggagagtatagtctataa

SEQ ID NO: 42 - RNA, 21 nt, synthetic construct
  source 1..21: mol_type = other RNA
agtatagtctatacattggaa

SEQ ID NO: 43 - RNA, 21 nt, synthetic construct
  source 1..21: mol_type = other RNA
tagtctatacattggaagaca

SEQ ID NO: 44 - RNA, 21 nt, synthetic construct
  source 1..21: mol_type = other RNA
agagtcttttctcctacagta

SEQ ID NO: 45 - RNA, 21 nt, synthetic construct
  source 1..21: mol_type = other RNA
tacattggaagacacaaagta

SEQ ID NO: 46 - RNA, 21 nt, synthetic construct
  source 1..21: mol_type = other RNA
ttggaagacacaaagttacaa

SEQ ID NO: 47 - RNA, 21 nt, synthetic construct
  source 1..21: mol_type = other RNA
agacacaaagttacatccaaa

SEQ ID NO: 48 - RNA, 21 nt, synthetic construct
  source 1..21: mol_type = other RNA
acaaagttacatccaaagtta

SEQ ID NO: 49 - RNA, 21 nt, synthetic construct
  source 1..21: mol_type = other RNA
aagttacatccaaagttatca

SEQ ID NO: 50 - RNA, 21 nt, synthetic construct
  source 1..21: mol_type = other RNA
tacatccaaagttatcgaaaa

SEQ ID NO: 51 - RNA, 21 nt, synthetic construct
  source 1..21: mol_type = other RNA
tccaaagttatcgaaaagtta

SEQ ID NO: 52 - RNA, 21 nt, synthetic construct
  source 1..21: mol_type = other RNA
gagacaatgagctactaatta

SEQ ID NO: 53 - RNA, 21 nt, synthetic construct
  source 1..21: mol_type = other RNA
agacaatgagctactaattta

SEQ ID NO: 54 - RNA, 21 nt, synthetic construct
  source 1..21: mol_type = other RNA
aatgagctactaatttataaa

SEQ ID NO: 55 - RNA, 21 nt, synthetic construct
  source 1..21: mol_type = other RNA
gagctactaatttataaagaa

SEQ ID NO: 56 - RNA, 21 nt, synthetic construct
  source 1..21: mol_type = other RNA
ctcatcaggtattgctgaata

SEQ ID NO: 57 - RNA, 21 nt, synthetic construct
  source 1..21: mol_type = other RNA
tcaggtattgctgaattttga

SEQ ID NO: 58 - RNA, 21 nt, synthetic construct
  source 1..21: mol_type = other RNA
gtattgctgaattttggatca

SEQ ID NO: 59 - RNA, 21 nt, synthetic construct
  source 1..21: mol_type = other RNA
gaagctcagcccaagattgta

SEQ ID NO: 60 - RNA, 21 nt, synthetic construct
  source 1..21: mol_type = other RNA
gcattgttgaattttgggtca

SEQ ID NO: 61 - RNA, 21 nt, synthetic construct
  source 1..21: mol_type = other RNA
ttgttgaattttgggtcaata

SEQ ID NO: 62 - RNA, 21 nt, synthetic construct
  source 1..21: mol_type = other RNA
attcctatgggggcaagttta

SEQ ID NO: 63 - RNA, 21 nt, synthetic construct
  source 1..21: mol_type = other RNA
aaaatatcctgtctgcctata

SEQ ID NO: 64 - RNA, 21 nt, synthetic construct
  source 1..21: mol_type = other RNA
aaatatcctgtctgcctatca

SEQ ID NO: 65 - RNA, 21 nt, synthetic construct
  source 1..21: mol_type = other RNA
aatatcctgtctgcctatcaa

SEQ ID NO: 66 - RNA, 21 nt, synthetic construct
  source 1..21: mol_type = other RNA
caggctctgaactatgaaata

SEQ ID NO: 67 - RNA, 21 nt, synthetic construct
  source 1..21: mol_type = other RNA
aggctctgaactatgaaatca

SEQ ID NO: 68 - RNA, 21 nt, synthetic construct
  source 1..21: mol_type = other RNA
ggctctgaactatgaaatcaa

SEQ ID NO: 69 - RNA, 21 nt, synthetic construct
  source 1..21: mol_type = other RNA
gctctgaactatgaaatcaga

SEQ ID NO: 70 - RNA, 21 nt, synthetic construct
  source 1..21: mol_type = other RNA
gaggatatgtcatcatcaaaa

SEQ ID NO: 71 - RNA, 21 nt, synthetic construct
  source 1..21: mol_type = other RNA
tatgtcatcatcaaaccctta

SEQ ID NO: 72 - RNA, 21 nt, synthetic construct
  source 1..21: mol_type = other RNA
catcatcaaacccttggtgta

SEQ ID NO: 73 - RNA, 21 nt, synthetic construct
  source 1..21: mol_type = other RNA
aacgagagcacttgaaaatga

SEQ ID NO: 74 - RNA, 21 nt, synthetic construct
  source 1..21: mol_type = other RNA
cgagagcacttgaaaatgaaa

SEQ ID NO: 75 - RNA, 21 nt, synthetic construct
  source 1..21: mol_type = other RNA
agcacttgaaaatgaaatgaa

SEQ ID NO: 76 - RNA, 21 nt, synthetic construct
  source 1..21: mol_type = other RNA
gcacttgaaaatgaaatgaca

SEQ ID NO: 77 - RNA, 21 nt, synthetic construct
  source 1..21: mol_type = other RNA
aaatgaaatgactgtctaaga

SEQ ID NO: 78 - RNA, 21 nt, synthetic construct
  source 1..21: mol_type = other RNA
aatgaaatgactgtctaagaa

SEQ ID NO: 79 - RNA, 21 nt, synthetic construct
  source 1..21: mol_type = other RNA
tgaaatgactgtctaagagaa

SEQ ID NO: 80 - RNA, 21 nt, synthetic construct
  source 1..21: mol_type = other RNA
gaaatgactgtctaagagata

SEQ ID NO: 81 - RNA, 21 nt, synthetic construct
  source 1..21: mol_type = other RNA
aaatgactgtctaagagatca

SEQ ID NO: 82 - RNA, 21 nt, synthetic construct
  source 1..21: mol_type = other RNA
caactggatactagatcttaa

SEQ ID NO: 83 - RNA, 21 nt, synthetic construct
  source 1..21: mol_type = other RNA
gcagctctttcttctttgaaa

SEQ ID NO: 84 - RNA, 21 nt, synthetic construct
  source 1..21: mol_type = other RNA
ctctttcttctttgaatttca

SEQ ID NO: 85 - RNA, 21 nt, synthetic construct
  source 1..21: mol_type = other RNA
ctttcttctttgaatttccta

SEQ ID NO: 86 - RNA, 21 nt, synthetic construct
  source 1..21: mol_type = other RNA
ctttgaatttcctatctgtaa

SEQ ID NO: 87 - RNA, 21 nt, synthetic construct
  source 1..21: mol_type = other RNA
tttgaatttcctatctgtata

SEQ ID NO: 88 - RNA, 21 nt, synthetic construct
  source 1..21: mol_type = other RNA
tgaatttcctatctgtatgta

SEQ ID NO: 89 - RNA, 21 nt, synthetic construct
  source 1..21: mol_type = other RNA
aatttcctatctgtatgtcta

SEQ ID NO: 90 - RNA, 21 nt, synthetic construct
  source 1..21: mol_type = other RNA
atctgtatgtctgcctaatta

SEQ ID NO: 91 - RNA, 21 nt, synthetic construct
  source 1..21: mol_type = other RNA
tgtatgtctgcctaattaaaa

SEQ ID NO: 92 - RNA, 21 nt, synthetic construct
  source 1..21: mol_type = other RNA
gtatgtctgcctaattaaaaa

SEQ ID NO: 93 - RNA, 21 nt, synthetic construct
  source 1..21: mol_type = other RNA
tatgtctgcctaattaaaaaa

SEQ ID NO: 94 - RNA, 21 nt, synthetic construct
  source 1..21: mol_type = other RNA
tgtctgcctaattaaaaaaaa

SEQ ID NO: 95 - RNA, 21 nt, synthetic construct
  source 1..21: mol_type = other RNA
ttgtattatgctacctgcaaa

SEQ ID NO: 96 - RNA, 21 nt, synthetic construct
  source 1..21: mol_type = other RNA
ttatgctacctgcaaaaaaaa

SEQ ID NO: 97 - RNA, 23 nt, synthetic construct
  source 1..23: mol_type = other RNA
tgctgttatagcagaagcagtga

SEQ ID NO: 98 - RNA, 23 nt, synthetic construct
  source 1..23: mol_type = other RNA
taaagcagcggcttgttcatatt

SEQ ID NO: 99 - RNA, 23 nt, synthetic construct
  source 1..23: mol_type = other RNA
tatacaaacaccttcccactgag

SEQ ID NO: 100 - RNA, 23 nt, synthetic construct
  source 1..23: mol_type = other RNA
ttctctaggaaatacaaacacct

SEQ ID NO: 101 - RNA, 23 nt, synthetic construct
  source 1..23: mol_type = other RNA
ttttacatgatcagtaacagatt

SEQ ID NO: 102 - RNA, 23 nt, synthetic construct
  source 1..23: mol_type = other RNA
ttttacatgatcagtaacagatt

SEQ ID NO: 103 - RNA, 23 nt, synthetic construct
  source 1..23: mol_type = other RNA
taagtttacatgatcagtaacag

SEQ ID NO: 104 - RNA, 23 nt, synthetic construct
  source 1..23: mol_type = other RNA
ttcaagtttacatgatcagtaac

SEQ ID NO: 105 - RNA, 23 nt, synthetic construct
  source 1..23: mol_type = other RNA
ttgtgatcaagtttacatgatca

SEQ ID NO: 106 - RNA, 23 nt, synthetic construct
  source 1..23: mol_type = other RNA
tgtgtgatcaagtttacatgatc

SEQ ID NO: 107 - RNA, 23 nt, synthetic construct
  source 1..23: mol_type = other RNA
tcaaggtaaagttctgtagaggc

SEQ ID NO: 108 - RNA, 23 nt, synthetic construct
  source 1..23: mol_type = other RNA
ttcgaaaacacaaggtaaagttc

SEQ ID NO: 109 - RNA, 23 nt, synthetic construct
  source 1..23: mol_type = other RNA
tatcactataggctcgaaaacac

SEQ ID NO: 110 - RNA, 23 nt, synthetic construct
  source 1..23: mol_type = other RNA
tagcttcacatgatcagtttcag

SEQ ID NO: 111 - RNA, 23 nt, synthetic construct
  source 1..23: mol_type = other RNA
tgtgtaaaattctgcagaggttt

SEQ ID NO: 112 - RNA, 23 nt, synthetic construct
  source 1..23: mol_type = other RNA
taacacagtgtaaaattctgcag

SEQ ID NO: 113 - RNA, 23 nt, synthetic construct
  source 1..23: mol_type = other RNA
taaacacagtgtaaaattctgca

SEQ ID NO: 114 - RNA, 23 nt, synthetic construct
  source 1..23: mol_type = other RNA
ttataaactagtagctcattatc

SEQ ID NO: 115 - RNA, 23 nt, synthetic construct
  source 1..23: mol_type = other RNA
tttataaactagtagctcattat

SEQ ID NO: 116 - RNA, 23 nt, synthetic construct
  source 1..23: mol_type = other RNA
ttttataaactagtagctcatta

SEQ ID NO: 117 - RNA, 23 nt, synthetic construct
  source 1..23: mol_type = other RNA
tctttataaactagtagctcatt

SEQ ID NO: 118 - RNA, 23 nt, synthetic construct
  source 1..23: mol_type = other RNA
ttctttataaactagtagctcat

SEQ ID NO: 119 - RNA, 23 nt, synthetic construct
  source 1..23: mol_type = other RNA
tttctttataaactagtagctca

SEQ ID NO: 120 - RNA, 23 nt, synthetic construct
  source 1..23: mol_type = other RNA
ttcactgtaggttcggaaacaca

SEQ ID NO: 121 - RNA, 23 nt, synthetic construct
  source 1..23: mol_type = other RNA
tctttctttataaactagtagct

SEQ ID NO: 122 - RNA, 23 nt, synthetic construct
  source 1..23: mol_type = other RNA
taaaggtcactgtaggttcggaa

SEQ ID NO: 123 - RNA, 23 nt, synthetic construct
  source 1..23: mol_type = other RNA
tccaactctttctttataaacta

SEQ ID NO: 124 - RNA, 23 nt, synthetic construct
  source 1..23: mol_type = other RNA
tactctccaactctttctttata

SEQ ID NO: 125 - RNA, 23 nt, synthetic construct
  source 1..23: mol_type = other RNA
ttatagactatactctccaactc

SEQ ID NO: 126 - RNA, 23 nt, synthetic construct
  source 1..23: mol_type = other RNA
ttccaatgtatagactatactct

SEQ ID NO: 127 - RNA, 23 nt, synthetic construct
  source 1..23: mol_type = other RNA
tgtcttccaatgtatagactata

SEQ ID NO: 128 - RNA, 23 nt, synthetic construct
  source 1..23: mol_type = other RNA
tactgtaggagaaaagactctga

SEQ ID NO: 129 - RNA, 23 nt, synthetic construct
  source 1..23: mol_type = other RNA
tactttgtgtcttccaatgtata

SEQ ID NO: 130 - RNA, 23 nt, synthetic construct
  source 1..23: mol_type = other RNA
ttgtaactttgtgtcttccaatg

SEQ ID NO: 131 - RNA, 23 nt, synthetic construct
  source 1..23: mol_type = other RNA
tttggatgtaactttgtgtcttc

SEQ ID NO: 132 - RNA, 23 nt, synthetic construct
  source 1..23: mol_type = other RNA
taactttggatgtaactttgtgt

SEQ ID NO: 133 - RNA, 23 nt, synthetic construct
  source 1..23: mol_type = other RNA
tgataactttggatgtaactttg

SEQ ID NO: 134 - RNA, 23 nt, synthetic construct
  source 1..23: mol_type = other RNA
ttttcgataactttggatgtaac

SEQ ID NO: 135 - RNA, 23 nt, synthetic construct
  source 1..23: mol_type = other RNA
taacttttcgataactttggatg

SEQ ID NO: 136 - RNA, 23 nt, synthetic construct
  source 1..23: mol_type = other RNA
taattagtagctcattgtctctg

SEQ ID NO: 137 - RNA, 23 nt, synthetic construct
  source 1..23: mol_type = other RNA
taaattagtagctcattgtctct

SEQ ID NO: 138 - RNA, 23 nt, synthetic construct
  source 1..23: mol_type = other RNA
tttataaattagtagctcattgt

SEQ ID NO: 139 - RNA, 23 nt, synthetic construct
  source 1..23: mol_type = other RNA
ttctttataaattagtagctcat

SEQ ID NO: 140 - RNA, 23 nt, synthetic construct
  source 1..23: mol_type = other RNA
tattcagcaatacctgatgagga

SEQ ID NO: 141 - RNA, 23 nt, synthetic construct
  source 1..23: mol_type = other RNA
tcaaaattcagcaatacctgatg

SEQ ID NO: 142 - RNA, 23 nt, synthetic construct
  source 1..23: mol_type = other RNA
tgatccaaaattcagcaatacct

SEQ ID NO: 143 - RNA, 23 nt, synthetic construct
  source 1..23: mol_type = other RNA
tacaatcttgggctgagcttcta

SEQ ID NO: 144 - RNA, 23 nt, synthetic construct
  source 1..23: mol_type = other RNA
tgacccaaaattcaacaatgcca

SEQ ID NO: 145 - RNA, 23 nt, synthetic construct
  source 1..23: mol_type = other RNA
tattgacccaaaattcaacaatg

SEQ ID NO: 146 - RNA, 23 nt, synthetic construct
  source 1..23: mol_type = other RNA
taaacttgcccccataggaatcc

SEQ ID NO: 147 - RNA, 23 nt, synthetic construct
  source 1..23: mol_type = other RNA
tataggcagacaggatattttct

SEQ ID NO: 148 - RNA, 23 nt, synthetic construct
  source 1..23: mol_type = other RNA
tgataggcagacaggatattttc

SEQ ID NO: 149 - RNA, 23 nt, synthetic construct
  source 1..23: mol_type = other RNA
ttgataggcagacaggatatttt

SEQ ID NO: 150 - RNA, 23 nt, synthetic construct
  source 1..23: mol_type = other RNA
tatttcatagttcagagcctgcc

SEQ ID NO: 151 - RNA, 23 nt, synthetic construct
  source 1..23: mol_type = other RNA
tgatttcatagttcagagcctgc

SEQ ID NO: 152 - RNA, 23 nt, synthetic construct
  source 1..23: mol_type = other RNA
ttgatttcatagttcagagcctg

SEQ ID NO: 153 - RNA, 23 nt, synthetic construct
  source 1..23: mol_type = other RNA
tctgatttcatagttcagagcct

SEQ ID NO: 154 - RNA, 23 nt, synthetic construct
  source 1..23: mol_type = other RNA
ttttgatgatgacatatcctctg

SEQ ID NO: 155 - RNA, 23 nt, synthetic construct
  source 1..23: mol_type = other RNA
taagggtttgatgatgacatatc

SEQ ID NO: 156 - RNA, 23 nt, synthetic construct
  source 1..23: mol_type = other RNA
tacaccaagggtttgatgatgac

SEQ ID NO: 157 - RNA, 23 nt, synthetic construct
  source 1..23: mol_type = other RNA
tcattttcaagtgctctcgttga

SEQ ID NO: 158 - RNA, 23 nt, synthetic construct
  source 1..23: mol_type = other RNA
tttcattttcaagtgctctcgtt

SEQ ID NO: 159 - RNA, 23 nt, synthetic construct
  source 1..23: mol_type = other RNA
ttcatttcattttcaagtgctct

SEQ ID NO: 160 - RNA, 23 nt, synthetic construct
  source 1..23: mol_type = other RNA
tgtcatttcattttcaagtgctc

SEQ ID NO: 161 - RNA, 23 nt, synthetic construct
  source 1..23: mol_type = other RNA
tcttagacagtcatttcattttc

SEQ ID NO: 162 - RNA, 23 nt, synthetic construct
  source 1..23: mol_type = other RNA
ttcttagacagtcatttcatttt

SEQ ID NO: 163 - RNA, 23 nt, synthetic construct
  source 1..23: mol_type = other RNA
ttctcttagacagtcatttcatt

SEQ ID NO: 164 - RNA, 23 nt, synthetic construct
  source 1..23: mol_type = other RNA
tatctcttagacagtcatttcat

SEQ ID NO: 165 - RNA, 23 nt, synthetic construct
  source 1..23: mol_type = other RNA
tgatctcttagacagtcatttca

SEQ ID NO: 166 - RNA, 23 nt, synthetic construct
  source 1..23: mol_type = other RNA
ttaagatctagtatccagttgct

SEQ ID NO: 167 - RNA, 23 nt, synthetic construct
  source 1..23: mol_type = other RNA
tttcaaagaagaaagagctgcag

SEQ ID NO: 168 - RNA, 23 nt, synthetic construct
  source 1..23: mol_type = other RNA
tgaaattcaaagaagaaagagct

SEQ ID NO: 169 - RNA, 23 nt, synthetic construct
  source 1..23: mol_type = other RNA
taggaaattcaaagaagaaagag

SEQ ID NO: 170 - RNA, 23 nt, synthetic construct
  source 1..23: mol_type = other RNA
ttacagataggaaattcaaagaa

SEQ ID NO: 171 - RNA, 23 nt, synthetic construct
  source 1..23: mol_type = other RNA
tatacagataggaaattcaaaga

SEQ ID NO: 172 - RNA, 23 nt, synthetic construct
  source 1..23: mol_type = other RNA
tacatacagataggaaattcaaa

SEQ ID NO: 173 - RNA, 23 nt, synthetic construct
  source 1..23: mol_type = other RNA
tagacatacagataggaaattca

SEQ ID NO: 174 - RNA, 23 nt, synthetic construct
  source 1..23: mol_type = other RNA
taattaggcagacatacagatag

SEQ ID NO: 175 - RNA, 23 nt, synthetic construct
  source 1..23: mol_type = other RNA
ttttaattaggcagacatacaga

SEQ ID NO: 176 - RNA, 23 nt, synthetic construct
  source 1..23: mol_type = other RNA
tttttaattaggcagacatacag

SEQ ID NO: 177 - RNA, 23 nt, synthetic construct
  source 1..23: mol_type = other RNA
ttttttaattaggcagacataca

SEQ ID NO: 178 - RNA, 23 nt, synthetic construct
  source 1..23: mol_type = other RNA
ttttttttaattaggcagacata

SEQ ID NO: 179 - RNA, 23 nt, synthetic construct
  source 1..23: mol_type = other RNA
tttgcaggtagcataatacaata

SEQ ID NO: 180 - RNA, 23 nt, synthetic construct
  source 1..23: mol_type = other RNA
ttttttttgcaggtagcataata

SEQ ID NO: 181 - RNA, 21 nt, synthetic construct
  source 1..21: mol_type = other RNA
  modified_base 1: mod_base = OTHER; note = 2'-O-methyladenosine-3'-phosphorothioate
  modified_base 2: mod_base = OTHER; note = 2'-O-methylcytidine-3'-phosphorothioate
  modified_base 3: mod_base = OTHER; note = 2'-O-methyluridine-3'-phosphate
  modified_base 4: mod_base = OTHER; note = 2'-O-methylguanosine-3'-phosphate
  modified_base 5: mod_base = OTHER; note = 2'-O-methylcytidine-3'-phosphate
  modified_base 6: mod_base = OTHER; note = 2'-O-methyluridine-3'-phosphate
  modified_base 7: mod_base = OTHER; note = 2'-deoxy-2'-fluorouridine-3'-phosphate
  modified_base 8: mod_base = OTHER; note = 2'-O-methylcytidine-3'-phosphate
  modified_base 9: mod_base = OTHER; note = 2'-deoxy-2'-fluorouridine-3'-phosphate
  modified_base 10: mod_base = OTHER; note = 2'-deoxy-2'-fluoroguanosine-3'-phosphate
  modified_base 11: mod_base = OTHER; note = 2'-deoxy-2'-fluorocytidine-3'-phosphate
  modified_base 12: mod_base = OTHER; note = 2'-O-methyluridine-3'-phosphate
  modified_base 13: mod_base = OTHER; note = 2'-O-methyladenosine-3'-phosphate
  modified_base 14: mod_base = OTHER; note = 2'-O-methyluridine-3'-phosphate
  modified_base 15: mod_base = OTHER; note = 2'-O-methyladenosine-3'-phosphate
  modified_base 16: mod_base = OTHER; note = 2'-O-methyladenosine-3'-phosphate
  modified_base 17: mod_base = OTHER; note = 2'-O-methylcytidine-3'-phosphate
  modified_base 18: mod_base = OTHER; note = 2'-O-methyladenosine-3'-phosphate
  modified_base 19: mod_base = OTHER; note = 2'-O-methylguanosine-3'-phosphate
  modified_base 20: mod_base = OTHER; note = 2'-O-methylcytidine-3'-phosphate
  modified_base 21: mod_base = OTHER; note = 2'-O-methyladenosine-3'-phosphate ((2S,4R)-1-[29-[[2-(acetylamino)-2-deoxy-beta-D-galactopyra nosyl]oxy]-14,14-bis[[3-[[3-[[5-[[2-(acetylamino)-2-deoxy-b eta-D-galactopyranosyl]oxy]-1-oxopentyl]amino]propyl]amino] -3-oxopropoxy]methyl]-1,12,19,25-tetraoxo-16-oxa-13,20,24-t riazanonacos-1-yl]-4-hydroxy-2-pyrrolidinyl)methyl ester
actgcttctgctataacagca

SEQ ID NO: 182 - RNA, 21 nt, synthetic construct
  source 1..21: mol_type = other RNA
  modified_base 1: mod_base = OTHER; note = 2'-O-methyluridine-3'-phosphorothioate
  modified_base 2: mod_base = OTHER; note = 2'-O-methyladenosine-3'-phosphorothioate
  modified_base 3: mod_base = OTHER; note = 2'-O-methyluridine-3'-phosphate
  modified_base 4: mod_base = OTHER; note = 2'-O-methylguanosine-3'-phosphate
  modified_base 5: mod_base = OTHER; note = 2'-O-methyladenosine-3'-phosphate
  modified_base 6: mod_base = OTHER; note = 2'-O-methyladenosine-3'-phosphate
  modified_base 7: mod_base = OTHER; note = 2'-deoxy-2'-fluorocytidine-3'-phosphate
  modified_base 8: mod_base = OTHER; note = 2'-O-methyladenosine-3'-phosphate
  modified_base 9: mod_base = OTHER; note = 2'-deoxy-2'-fluoroadenosine-3'-phosphate
  modified_base 10: mod_base = OTHER; note = 2'-deoxy-2'-fluoroguanosine-3'-phosphate
  modified_base 11: mod_base = OTHER; note = 2'-deoxy-2'-fluorocytidine-3'-phosphate
  modified_base 12: mod_base = OTHER; note = 2'-O-methylcytidine-3'-phosphate
  modified_base 13: mod_base = OTHER; note = 2'-O-methylguanosine-3'-phosphate
  modified_base 14: mod_base = OTHER; note = 2'-O-methylcytidine-3'-phosphate
  modified_base 15: mod_base = OTHER; note = 2'-O-methyluridine-3'-phosphate
  modified_base 16: mod_base = OTHER; note = 2'-O-methylguanosine-3'-phosphate
  modified_base 17: mod_base = OTHER; note = 2'-O-methylcytidine-3'-phosphate
  modified_base 18: mod_base = OTHER; note = 2'-O-methyluridine-3'-phosphate
  modified_base 19: mod_base = OTHER; note = 2'-O-methyluridine-3'-phosphate
  modified_base 20: mod_base = OTHER; note = 2'-O-methyluridine-3'-phosphate
  modified_base 21: mod_base = OTHER; note = 2'-O-methyladenosine-3'-phosphate ((2S,4R)-1-[29-[[2-(acetylamino)-2-deoxy-beta-D-galactopyra nosyl]oxy]-14,14-bis[[3-[[3-[[5-[[2-(acetylamino)-2-deoxy-b eta-D-galactopyranosyl]oxy]-1-oxopentyl]amino]propyl]amino] -3-oxopropoxy]methyl]-1,12,19,25-tetraoxo-16-oxa-13,20,24-t riazanonacos-1-yl]-4-hydroxy-2-pyrrolidinyl)methyl ester
tatgaacaagccgctgcttta

SEQ ID NO: 183 - RNA, 21 nt, synthetic construct
  source 1..21: mol_type = other RNA
  modified_base 1: mod_base = OTHER; note = 2'-O-methylcytidine-3'-phosphorothioate
  modified_base 2: mod_base = OTHER; note = 2'-O-methyladenosine-3'-phosphorothioate
  modified_base 3: mod_base = OTHER; note = 2'-O-methylguanosine-3'-phosphate
  modified_base 4: mod_base = OTHER; note = 2'-O-methyluridine-3'-phosphate
  modified_base 5: mod_base = OTHER; note = 2'-O-methylguanosine-3'-phosphate
  modified_base 6: mod_base = OTHER; note = 2'-O-methylguanosine-3'-phosphate
  modified_base 7: mod_base = OTHER; note = 2'-deoxy-2'-fluoroguanosine-3'-phosphate
  modified_base 8: mod_base = OTHER; note = 2'-O-methyladenosine-3'-phosphate
  modified_base 9: mod_base = OTHER; note = 2'-deoxy-2'-fluoroadenosine-3'-phosphate
  modified_base 10: mod_base = OTHER; note = 2'-deoxy-2'-fluoroguanosine-3'-phosphate
  modified_base 11: mod_base = OTHER; note = 2'-deoxy-2'-fluoroguanosine-3'-phosphate
  modified_base 12: mod_base = OTHER; note = 2'-O-methyluridine-3'-phosphate
  modified_base 13: mod_base = OTHER; note = 2'-O-methylguanosine-3'-phosphate
  modified_base 14: mod_base = OTHER; note = 2'-O-methyluridine-3'-phosphate
  modified_base 15: mod_base = OTHER; note = 2'-O-methyluridine-3'-phosphate
  modified_base 16: mod_base = OTHER; note = 2'-O-methyluridine-3'-phosphate
  modified_base 17: mod_base = OTHER; note = 2'-O-methylguanosine-3'-phosphate
  modified_base 18: mod_base = OTHER; note = 2'-O-methyluridine-3'-phosphate
  modified_base 19: mod_base = OTHER; note = 2'-O-methyladenosine-3'-phosphate
  modified_base 20: mod_base = OTHER; note = 2'-O-methyluridine-3'-phosphate
  modified_base 21: mod_base = OTHER; note = 2'-O-methyladenosine-3'-phosphate ((2S,4R)-1-[29-[[2-(acetylamino)-2-deoxy-beta-D-galactopyra nosyl]oxy]-14,14-bis[[3-[[3-[[5-[[2-(acetylamino)-2-deoxy-b eta-D-galactopyranosyl]oxy]-1-oxopentyl]amino]propyl]amino] -3-oxopropoxy]methyl]-1,12,19,25-tetraoxo-16-oxa-13,20,24-t riazanonacos-1-yl]-4-hydroxy-2-pyrrolidinyl)methyl ester
cagtgggaaggtgtttgtata

SEQ ID NO: 184 - RNA, 21 nt, synthetic construct
  source 1..21: mol_type = other RNA
  modified_base 1: mod_base = OTHER; note = 2'-O-methylguanosine-3'-phosphorothioate
  modified_base 2: mod_base = OTHER; note = 2'-O-methyluridine-3'-phosphorothioate
  modified_base 3: mod_base = OTHER; note = 2'-O-methylguanosine-3'-phosphate
  modified_base 4: mod_base = OTHER; note = 2'-O-methyluridine-3'-phosphate
  modified_base 5: mod_base = OTHER; note = 2'-O-methyluridine-3'-phosphate
  modified_base 6: mod_base = OTHER; note = 2'-O-methyluridine-3'-phosphate
  modified_base 7: mod_base = OTHER; note = 2'-deoxy-2'-fluoroguanosine-3'-phosphate
  modified_base 8: mod_base = OTHER; note = 2'-O-methyluridine-3'-phosphate
  modified_base 9: mod_base = OTHER; note = 2'-deoxy-2'-fluoroadenosine-3'-phosphate
  modified_base 10: mod_base = OTHER; note = 2'-deoxy-2'-fluorouridine-3'-phosphate
  modified_base 11: mod_base = OTHER; note = 2'-deoxy-2'-fluorouridine-3'-phosphate
  modified_base 12: mod_base = OTHER; note = 2'-O-methyluridine-3'-phosphate
  modified_base 13: mod_base = OTHER; note = 2'-O-methylcytidine-3'-phosphate
  modified_base 14: mod_base = OTHER; note = 2'-O-methylcytidine-3'-phosphate
  modified_base 15: mod_base = OTHER; note = 2'-O-methyluridine-3'-phosphate
  modified_base 16: mod_base = OTHER; note = 2'-O-methyladenosine-3'-phosphate
  modified_base 17: mod_base = OTHER; note = 2'-O-methylguanosine-3'-phosphate
  modified_base 18: mod_base = OTHER; note = 2'-O-methyladenosine-3'-phosphate
  modified_base 19: mod_base = OTHER; note = 2'-O-methylguanosine-3'-phosphate
  modified_base 20: mod_base = OTHER; note = 2'-O-methyladenosine-3'-phosphate
  modified_base 21: mod_base = OTHER; note = 2'-O-methyladenosine-3'-phosphate ((2S,4R)-1-[29-[[2-(acetylamino)-2-deoxy-beta-D-galactopyra nosyl]oxy]-14,14-bis[[3-[[3-[[5-[[2-(acetylamino)-2-deoxy-b eta-D-galactopyranosyl]oxy]-1-oxopentyl]amino]propyl]amino] -3-oxopropoxy]methyl]-1,12,19,25-tetraoxo-16-oxa-13,20,24-t riazanonacos-1-yl]-4-hydroxy-2-pyrrolidinyl)methyl ester
gtgtttgtatttcctagagaa

SEQ ID NO: 185 - RNA, 21 nt, synthetic construct
  source 1..21: mol_type = other RNA
  modified_base 1: mod_base = OTHER; note = 2'-O-methyluridine-3'-phosphorothioate
  modified_base 2: mod_base = OTHER; note = 2'-O-methylcytidine-3'-phosphorothioate
  modified_base 3: mod_base = OTHER; note = 2'-O-methyluridine-3'-phosphate
  modified_base 4: mod_base = OTHER; note = 2'-O-methylguanosine-3'-phosphate
  modified_base 5: mod_base = OTHER; note = 2'-O-methyluridine-3'-phosphate
  modified_base 6: mod_base = OTHER; note = 2'-O-methyluridine-3'-phosphate
  modified_base 7: mod_base = OTHER; note = 2'-deoxy-2'-fluoroadenosine-3'-phosphate
  modified_base 8: mod_base = OTHER; note = 2'-O-methylcytidine-3'-phosphate
  modified_base 9: mod_base = OTHER; note = 2'-deoxy-2'-fluorouridine-3'-phosphate
  modified_base 10: mod_base = OTHER; note = 2'-deoxy-2'-fluoroguanosine-3'-phosphate
  modified_base 11: mod_base = OTHER; note = 2'-deoxy-2'-fluoroadenosine-3'-phosphate
  modified_base 12: mod_base = OTHER; note = 2'-O-methyluridine-3'-phosphate
  modified_base 13: mod_base = OTHER; note = 2'-O-methylcytidine-3'-phosphate
  modified_base 14: mod_base = OTHER; note = 2'-O-methyladenosine-3'-phosphate
  modified_base 15: mod_base = OTHER; note = 2'-O-methyluridine-3'-phosphate
  modified_base 16: mod_base = OTHER; note = 2'-O-methylguanosine-3'-phosphate
  modified_base 17: mod_base = OTHER; note = 2'-O-methyluridine-3'-phosphate
  modified_base 18: mod_base = OTHER; note = 2'-O-methyladenosine-3'-phosphate
  modified_base 19: mod_base = OTHER; note = 2'-O-methyladenosine-3'-phosphate
  modified_base 20: mod_base = OTHER; note = 2'-O-methyladenosine-3'-phosphate
  modified_base 21: mod_base = OTHER; note = 2'-O-methyladenosine-3'-phosphate ((2S,4R)-1-[29-[[2-(acetylamino)-2-deoxy-beta-D-galactopyra nosyl]oxy]-14,14-bis[[3-[[3-[[5-[[2-(acetylamino)-2-deoxy-b eta-D-galactopyranosyl]oxy]-1-oxopentyl]amino]propyl]amino] -3-oxopropoxy]methyl]-1,12,19,25-tetraoxo-16-oxa-13,20,24-t riazanonacos-1-yl]-4-hydroxy-2-pyrrolidinyl)methyl ester
tctgttactgatcatgtaaaa

SEQ ID NO: 186 - RNA, 21 nt, synthetic construct
  source 1..21: mol_type = other RNA
  modified_base 1: mod_base = OTHER; note = 2'-O-methyluridine-3'-phosphorothioate
  modified_base 2: mod_base = OTHER; note = 2'-O-methylcytidine-3'-phosphorothioate
  modified_base 3: mod_base = OTHER; note = 2'-O-methyluridine-3'-phosphate
  modified_base 4: mod_base = OTHER; note = 2'-O-methylguanosine-3'-phosphate
  modified_base 5: mod_base = OTHER; note = 2'-O-methyluridine-3'-phosphate
  modified_base 6: mod_base = OTHER; note = 2'-O-methyluridine-3'-phosphate
  modified_base 7: mod_base = OTHER; note = 2'-deoxy-2'-fluoroadenosine-3'-phosphate
  modified_base 8: mod_base = OTHER; note = 2'-O-methylcytidine-3'-phosphate
  modified_base 9: mod_base = OTHER; note = 2'-deoxy-2'-fluorouridine-3'-phosphate
  modified_base 10: mod_base = OTHER; note = 2'-deoxy-2'-fluoroguanosine-3'-phosphate
  modified_base 11: mod_base = OTHER; note = 2'-deoxy-2'-fluoroadenosine-3'-phosphate
  modified_base 12: mod_base = OTHER; note = 2'-O-methyluridine-3'-phosphate
  modified_base 13: mod_base = OTHER; note = 2'-O-methylcytidine-3'-phosphate
  modified_base 14: mod_base = OTHER; note = 2'-O-methyladenosine-3'-phosphate
  modified_base 15: mod_base = OTHER; note = 2'-O-methyluridine-3'-phosphate
  modified_base 16: mod_base = OTHER; note = 2'-O-methylguanosine-3'-phosphate
  modified_base 17: mod_base = OTHER; note = 2'-O-methyluridine-3'-phosphate
  modified_base 18: mod_base = OTHER; note = 2'-O-methyladenosine-3'-phosphate
  modified_base 19: mod_base = OTHER; note = 2'-O-methyladenosine-3'-phosphate
  modified_base 20: mod_base = OTHER; note = 2'-O-methyladenosine-3'-phosphate
  modified_base 21: mod_base = OTHER; note = 2'-O-methyladenosine-3'-phosphate ((2S,4R)-1-[29-[[2-(acetylamino)-2-deoxy-beta-D-galactopyra nosyl]oxy]-14,14-bis[[3-[[3-[[5-[[2-(acetylamino)-2-deoxy-b eta-D-galactopyranosyl]oxy]-1-oxopentyl]amino]propyl]amino] -3-oxopropoxy]methyl]-1,12,19,25-tetraoxo-16-oxa-13,20,24-t riazanonacos-1-yl]-4-hydroxy-2-pyrrolidinyl)methyl ester
tctgttactgatcatgtaaaa

SEQ ID NO: 187 - RNA, 21 nt, synthetic construct
  source 1..21: mol_type = other RNA
  modified_base 1: mod_base = OTHER; note = 2'-O-methylguanosine-3'-phosphorothioate
  modified_base 2: mod_base = OTHER; note = 2'-O-methyluridine-3'-phosphorothioate
  modified_base 3: mod_base = OTHER; note = 2'-O-methyluridine-3'-phosphate
  modified_base 4: mod_base = OTHER; note = 2'-O-methyladenosine-3'-phosphate
  modified_base 5: mod_base = OTHER; note = 2'-O-methylcytidine-3'-phosphate
  modified_base 6: mod_base = OTHER; note = 2'-O-methyluridine-3'-phosphate
  modified_base 7: mod_base = OTHER; note = 2'-deoxy-2'-fluoroguanosine-3'-phosphate
  modified_base 8: mod_base = OTHER; note = 2'-O-methyladenosine-3'-phosphate
  modified_base 9: mod_base = OTHER; note = 2'-deoxy-2'-fluorouridine-3'-phosphate
  modified_base 10: mod_base = OTHER; note = 2'-deoxy-2'-fluorocytidine-3'-phosphate
  modified_base 11: mod_base = OTHER; note = 2'-deoxy-2'-fluoroadenosine-3'-phosphate
  modified_base 12: mod_base = OTHER; note = 2'-O-methyluridine-3'-phosphate
  modified_base 13: mod_base = OTHER; note = 2'-O-methylguanosine-3'-phosphate
  modified_base 14: mod_base = OTHER; note = 2'-O-methyluridine-3'-phosphate
  modified_base 15: mod_base = OTHER; note = 2'-O-methyladenosine-3'-phosphate
  modified_base 16: mod_base = OTHER; note = 2'-O-methyladenosine-3'-phosphate
  modified_base 17: mod_base = OTHER; note = 2'-O-methyladenosine-3'-phosphate
  modified_base 18: mod_base = OTHER; note = 2'-O-methylcytidine-3'-phosphate
  modified_base 19: mod_base = OTHER; note = 2'-O-methyluridine-3'-phosphate
  modified_base 20: mod_base = OTHER; note = 2'-O-methyluridine-3'-phosphate
  modified_base 21: mod_base = OTHER; note = 2'-O-methyladenosine-3'-phosphate ((2S,4R)-1-[29-[[2-(acetylamino)-2-deoxy-beta-D-galactopyra nosyl]oxy]-14,14-bis[[3-[[3-[[5-[[2-(acetylamino)-2-deoxy-b eta-D-galactopyranosyl]oxy]-1-oxopentyl]amino]propyl]amino] -3-oxopropoxy]methyl]-1,12,19,25-tetraoxo-16-oxa-13,20,24-t riazanonacos-1-yl]-4-hydroxy-2-pyrrolidinyl)methyl ester
gttactgatcatgtaaactta

SEQ ID NO: 188 - RNA, 21 nt, synthetic construct
  source 1..21: mol_type = other RNA
  modified_base 1: mod_base = OTHER; note = 2'-O-methyluridine-3'-phosphorothioate
  modified_base 2: mod_base = OTHER; note = 2'-O-methyladenosine-3'-phosphorothioate
  modified_base 3: mod_base = OTHER; note = 2'-O-methylcytidine-3'-phosphate
  modified_base 4: mod_base = OTHER; note = 2'-O-methyluridine-3'-phosphate
  modified_base 5: mod_base = OTHER; note = 2'-O-methylguanosine-3'-phosphate
  modified_base 6: mod_base = OTHER; note = 2'-O-methyladenosine-3'-phosphate
  modified_base 7: mod_base = OTHER; note = 2'-deoxy-2'-fluorouridine-3'-phosphate
  modified_base 8: mod_base = OTHER; note = 2'-O-methylcytidine-3'-phosphate
  modified_base 9: mod_base = OTHER; note = 2'-deoxy-2'-fluoroadenosine-3'-phosphate
  modified_base 10: mod_base = OTHER; note = 2'-deoxy-2'-fluorouridine-3'-phosphate
  modified_base 11: mod_base = OTHER; note = 2'-deoxy-2'-fluoroguanosine-3'-phosphate
  modified_base 12: mod_base = OTHER; note = 2'-O-methyluridine-3'-phosphate
  modified_base 13: mod_base = OTHER; note = 2'-O-methyladenosine-3'-phosphate
  modified_base 14: mod_base = OTHER; note = 2'-O-methyladenosine-3'-phosphate
  modified_base 15: mod_base = OTHER; note = 2'-O-methyladenosine-3'-phosphate
  modified_base 16: mod_base = OTHER; note = 2'-O-methylcytidine-3'-phosphate
  modified_base 17: mod_base = OTHER; note = 2'-O-methyluridine-3'-phosphate
  modified_base 18: mod_base = OTHER; note = 2'-O-methyluridine-3'-phosphate
  modified_base 19: mod_base = OTHER; note = 2'-O-methylguanosine-3'-phosphate
  modified_base 20: mod_base = OTHER; note = 2'-O-methyladenosine-3'-phosphate
  modified_base 21: mod_base = OTHER; note = 2'-O-methyladenosine-3'-phosphate ((2S,4R)-1-[29-[[2-(acetylamino)-2-deoxy-beta-D-galactopyra nosyl]oxy]-14,14-bis[[3-[[3-[[5-[[2-(acetylamino)-2-deoxy-b eta-D-galactopyranosyl]oxy]-1-oxopentyl]amino]propyl]amino] -3-oxopropoxy]methyl]-1,12,19,25-tetraoxo-16-oxa-13,20,24-t riazanonacos-1-yl]-4-hydroxy-2-pyrrolidinyl)methyl ester
tactgatcatgtaaacttgaa

SEQ ID NO: 189 - RNA, 21 nt, synthetic construct
  source 1..21: mol_type = other RNA
  modified_base 1: mod_base = OTHER; note = 2'-O-methyladenosine-3'-phosphorothioate
  modified_base 2: mod_base = OTHER; note = 2'-O-methyluridine-3'-phosphorothioate
  modified_base 3: mod_base = OTHER; note = 2'-O-methylcytidine-3'-phosphate
  modified_base 4: mod_base = OTHER; note = 2'-O-methyladenosine-3'-phosphate
  modified_base 5: mod_base = OTHER; note = 2'-O-methyluridine-3'-phosphate
  modified_base 6: mod_base = OTHER; note = 2'-O-methylguanosine-3'-phosphate
  modified_base 7: mod_base = OTHER; note = 2'-deoxy-2'-fluorouridine-3'-phosphate
  modified_base 8: mod_base = OTHER; note = 2'-O-methyladenosine-3'-phosphate
  modified_base 9: mod_base = OTHER; note = 2'-deoxy-2'-fluoroadenosine-3'-phosphate
  modified_base 10: mod_base = OTHER; note = 2'-deoxy-2'-fluoroadenosine-3'-phosphate
  modified_base 11: mod_base = OTHER; note = 2'-deoxy-2'-fluorocytidine-3'-phosphate
  modified_base 12: mod_base = OTHER; note = 2'-O-methyluridine-3'-phosphate
  modified_base 13: mod_base = OTHER; note = 2'-O-methyluridine-3'-phosphate
  modified_base 14: mod_base = OTHER; note = 2'-O-methylguanosine-3'-phosphate
  modified_base 15: mod_base = OTHER; note = 2'-O-methyladenosine-3'-phosphate
  modified_base 16: mod_base = OTHER; note = 2'-O-methyluridine-3'-phosphate
  modified_base 17: mod_base = OTHER; note = 2'-O-methylcytidine-3'-phosphate
  modified_base 18: mod_base = OTHER; note = 2'-O-methyladenosine-3'-phosphate
  modified_base 19: mod_base = OTHER; note = 2'-O-methylcytidine-3'-phosphate
  modified_base 20: mod_base = OTHER; note = 2'-O-methyladenosine-3'-phosphate
  modified_base 21: mod_base = OTHER; note = 2'-O-methyladenosine-3'-phosphate ((2S,4R)-1-[29-[[2-(acetylamino)-2-deoxy-beta-D-galactopyra nosyl]oxy]-14,14-bis[[3-[[3-[[5-[[2-(acetylamino)-2-deoxy-b eta-D-galactopyranosyl]oxy]-1-oxopentyl]amino]propyl]amino] -3-oxopropoxy]methyl]-1,12,19,25-tetraoxo-16-oxa-13,20,24-t riazanonacos-1-yl]-4-hydroxy-2-pyrrolidinyl)methyl ester
atcatgtaaacttgatcacaa

SEQ ID NO: 190 - RNA, 21 nt, synthetic construct
  source 1..21: mol_type = other RNA
  modified_base 1: mod_base = OTHER; note = 2'-O-methyluridine-3'-phosphorothioate
  modified_base 2: mod_base = OTHER; note = 2'-O-methylcytidine-3'-phosphorothioate
  modified_base 3: mod_base = OTHER; note = 2'-O-methyladenosine-3'-phosphate
  modified_base 4: mod_base = OTHER; note = 2'-O-methyluridine-3'-phosphate
  modified_base 5: mod_base = OTHER; note = 2'-O-methylguanosine-3'-phosphate
  modified_base 6: mod_base = OTHER; note = 2'-O-methyluridine-3'-phosphate
  modified_base 7: mod_base = OTHER; note = 2'-deoxy-2'-fluoroadenosine-3'-phosphate
  modified_base 8: mod_base = OTHER; note = 2'-O-methyladenosine-3'-phosphate
  modified_base 9: mod_base = OTHER; note = 2'-deoxy-2'-fluoroadenosine-3'-phosphate
  modified_base 10: mod_base = OTHER; note = 2'-deoxy-2'-fluorocytidine-3'-phosphate
  modified_base 11: mod_base = OTHER; note = 2'-deoxy-2'-fluorouridine-3'-phosphate
  modified_base 12: mod_base = OTHER; note = 2'-O-methyluridine-3'-phosphate
  modified_base 13: mod_base = OTHER; note = 2'-O-methylguanosine-3'-phosphate
  modified_base 14: mod_base = OTHER; note = 2'-O-methyladenosine-3'-phosphate
  modified_base 15: mod_base = OTHER; note = 2'-O-methyluridine-3'-phosphate
  modified_base 16: mod_base = OTHER; note = 2'-O-methylcytidine-3'-phosphate
  modified_base 17: mod_base = OTHER; note = 2'-O-methyladenosine-3'-phosphate
  modified_base 18: mod_base = OTHER; note = 2'-O-methylcytidine-3'-phosphate
  modified_base 19: mod_base = OTHER; note = 2'-O-methyladenosine-3'-phosphate
  modified_base 20: mod_base = OTHER; note = 2'-O-methylcytidine-3'-phosphate
  modified_base 21: mod_base = OTHER; note = 2'-O-methyladenosine-3'-phosphate ((2S,4R)-1-[29-[[2-(acetylamino)-2-deoxy-beta-D-galactopyra nosyl]oxy]-14,14-bis[[3-[[3-[[5-[[2-(acetylamino)-2-deoxy-b eta-D-galactopyranosyl]oxy]-1-oxopentyl]amino]propyl]amino] -3-oxopropoxy]methyl]-1,12,19,25-tetraoxo-16-oxa-13,20,24-t riazanonacos-1-yl]-4-hydroxy-2-pyrrolidinyl)methyl ester
tcatgtaaacttgatcacaca

SEQ ID NO: 191 - RNA, 21 nt, synthetic construct
  source 1..21: mol_type = other RNA
  modified_base 1: mod_base = OTHER; note = 2'-O-methylcytidine-3'-phosphorothioate
  modified_base 2: mod_base = OTHER; note = 2'-O-methyluridine-3'-phosphorothioate
  modified_base 3: mod_base = OTHER; note = 2'-O-methylcytidine-3'-phosphate
  modified_base 4: mod_base = OTHER; note = 2'-O-methyluridine-3'-phosphate
  modified_base 5: mod_base = OTHER; note = 2'-O-methyladenosine-3'-phosphate
  modified_base 6: mod_base = OTHER; note = 2'-O-methylcytidine-3'-phosphate
  modified_base 7: mod_base = OTHER; note = 2'-deoxy-2'-fluoroadenosine-3'-phosphate
  modified_base 8: mod_base = OTHER; note = 2'-O-methylguanosine-3'-phosphate
  modified_base 9: mod_base = OTHER; note = 2'-deoxy-2'-fluoroadenosine-3'-phosphate
  modified_base 10: mod_base = OTHER; note = 2'-deoxy-2'-fluoroadenosine-3'-phosphate
  modified_base 11: mod_base = OTHER; note = 2'-deoxy-2'-fluorocytidine-3'-phosphate
  modified_base 12: mod_base = OTHER; note = 2'-O-methyluridine-3'-phosphate
  modified_base 13: mod_base = OTHER; note = 2'-O-methyluridine-3'-phosphate
  modified_base 14: mod_base = OTHER; note = 2'-O-methyluridine-3'-phosphate
  modified_base 15: mod_base = OTHER; note = 2'-O-methyladenosine-3'-phosphate
  modified_base 16: mod_base = OTHER; note = 2'-O-methylcytidine-3'-phosphate
  modified_base 17: mod_base = OTHER; note = 2'-O-methylcytidine-3'-phosphate
  modified_base 18: mod_base = OTHER; note = 2'-O-methyluridine-3'-phosphate
  modified_base 19: mod_base = OTHER; note = 2'-O-methyluridine-3'-phosphate
  modified_base 20: mod_base = OTHER; note = 2'-O-methylguanosine-3'-phosphate
  modified_base 21: mod_base = OTHER; note = 2'-O-methyladenosine-3'-phosphate ((2S,4R)-1-[29-[[2-(acetylamino)-2-deoxy-beta-D-galactopyra nosyl]oxy]-14,14-bis[[3-[[3-[[5-[[2-(acetylamino)-2-deoxy-b eta-D-galactopyranosyl]oxy]-1-oxopentyl]amino]propyl]amino] -3-oxopropoxy]methyl]-1,12,19,25-tetraoxo-16-oxa-13,20,24-t riazanonacos-1-yl]-4-hydroxy-2-pyrrolidinyl)methyl ester
ctctacagaactttaccttga

SEQ ID NO: 192 - RNA, 21 nt, synthetic construct
  source 1..21: mol_type = other RNA
  modified_base 1: mod_base = OTHER; note = 2'-O-methyladenosine-3'-phosphorothioate
  modified_base 2: mod_base = OTHER; note = 2'-O-methylcytidine-3'-phosphorothioate
  modified_base 3: mod_base = OTHER; note = 2'-O-methyluridine-3'-phosphate
  modified_base 4: mod_base = OTHER; note = 2'-O-methyluridine-3'-phosphate
  modified_base 5: mod_base = OTHER; note = 2'-O-methyluridine-3'-phosphate
  modified_base 6: mod_base = OTHER; note = 2'-O-methyladenosine-3'-phosphate
  modified_base 7: mod_base = OTHER; note = 2'-deoxy-2'-fluorocytidine-3'-phosphate
  modified_base 8: mod_base = OTHER; note = 2'-O-methylcytidine-3'-phosphate
  modified_base 9: mod_base = OTHER; note = 2'-deoxy-2'-fluorouridine-3'-phosphate
  modified_base 10: mod_base = OTHER; note = 2'-deoxy-2'-fluorouridine-3'-phosphate
  modified_base 11: mod_base = OTHER; note = 2'-deoxy-2'-fluoroguanosine-3'-phosphate
  modified_base 12: mod_base = OTHER; note = 2'-O-methyluridine-3'-phosphate
  modified_base 13: mod_base = OTHER; note = 2'-O-methylguanosine-3'-phosphate
  modified_base 14: mod_base = OTHER; note = 2'-O-methyluridine-3'-phosphate
  modified_base 15: mod_base = OTHER; note = 2'-O-methyluridine-3'-phosphate
  modified_base 16: mod_base = OTHER; note = 2'-O-methyluridine-3'-phosphate
  modified_base 17: mod_base = OTHER; note = 2'-O-methyluridine-3'-phosphate
  modified_base 18: mod_base = OTHER; note = 2'-O-methylcytidine-3'-phosphate
  modified_base 19: mod_base = OTHER; note = 2'-O-methylguanosine-3'-phosphate
  modified_base 20: mod_base = OTHER; note = 2'-O-methyladenosine-3'-phosphate
  modified_base 21: mod_base = OTHER; note = 2'-O-methyladenosine-3'-phosphate ((2S,4R)-1-[29-[[2-(acetylamino)-2-deoxy-beta-D-galactopyra nosyl]oxy]-14,14-bis[[3-[[3-[[5-[[2-(acetylamino)-2-deoxy-b eta-D-galactopyranosyl]oxy]-1-oxopentyl]amino]propyl]amino] -3-oxopropoxy]methyl]-1,12,19,25-tetraoxo-16-oxa-13,20,24-t riazanonacos-1-yl]-4-hydroxy-2-pyrrolidinyl)methyl ester
actttaccttgtgttttcgaa

SEQ ID NO: 193 - RNA, 21 nt, synthetic construct
  source 1..21: mol_type = other RNA
  modified_base 1: mod_base = OTHER; note = 2'-O-methylguanosine-3'-phosphorothioate
  modified_base 2: mod_base = OTHER; note = 2'-O-methyluridine-3'-phosphorothioate
  modified_base 3: mod_base = OTHER; note = 2'-O-methyluridine-3'-phosphate
  modified_base 4: mod_base = OTHER; note = 2'-O-methyluridine-3'-phosphate
  modified_base 5: mod_base = OTHER; note = 2'-O-methyluridine-3'-phosphate
  modified_base 6: mod_base = OTHER; note = 2'-O-methylcytidine-3'-phosphate
  modified_base 7: mod_base = OTHER; note = 2'-deoxy-2'-fluoroguanosine-3'-phosphate
  modified_base 8: mod_base = OTHER; note = 2'-O-methyladenosine-3'-phosphate
  modified_base 9: mod_base = OTHER; note = 2'-deoxy-2'-fluoroguanosine-3'-phosphate
  modified_base 10: mod_base = OTHER; note = 2'-deoxy-2'-fluorocytidine-3'-phosphate
  modified_base 11: mod_base = OTHER; note = 2'-deoxy-2'-fluorocytidine-3'-phosphate
  modified_base 12: mod_base = OTHER; note = 2'-O-methyluridine-3'-phosphate
  modified_base 13: mod_base = OTHER; note = 2'-O-methyladenosine-3'-phosphate
  modified_base 14: mod_base = OTHER; note = 2'-O-methyluridine-3'-phosphate
  modified_base 15: mod_base = OTHER; note = 2'-O-methyladenosine-3'-phosphate
  modified_base 16: mod_base = OTHER; note = 2'-O-methylguanosine-3'-phosphate
  modified_base 17: mod_base = OTHER; note = 2'-O-methyluridine-3'-phosphate
  modified_base 18: mod_base = OTHER; note = 2'-O-methylguanosine-3'-phosphate
  modified_base 19: mod_base = OTHER; note = 2'-O-methyladenosine-3'-phosphate
  modified_base 20: mod_base = OTHER; note = 2'-O-methyluridine-3'-phosphate
  modified_base 21: mod_base = OTHER; note = 2'-O-methyladenosine-3'-phosphate ((2S,4R)-1-[29-[[2-(acetylamino)-2-deoxy-beta-D-galactopyra nosyl]oxy]-14,14-bis[[3-[[3-[[5-[[2-(acetylamino)-2-deoxy-b eta-D-galactopyranosyl]oxy]-1-oxopentyl]amino]propyl]amino] -3-oxopropoxy]methyl]-1,12,19,25-tetraoxo-16-oxa-13,20,24-t riazanonacos-1-yl]-4-hydroxy-2-pyrrolidinyl)methyl ester
gttttcgagcctatagtgata

SEQ ID NO: 194 - RNA, 21 nt, synthetic construct
  source 1..21: mol_type = other RNA
  modified_base 1: mod_base = OTHER; note = 2'-O-methylguanosine-3'-phosphorothioate
  modified_base 2: mod_base = OTHER; note = 2'-O-methyladenosine-3'-phosphorothioate
  modified_base 3: mod_base = OTHER; note = 2'-O-methyladenosine-3'-phosphate
  modified_base 4: mod_base = OTHER; note = 2'-O-methyladenosine-3'-phosphate
  modified_base 5: mod_base = OTHER; note = 2'-O-methylcytidine-3'-phosphate
  modified_base 6: mod_base = OTHER; note = 2'-O-methyluridine-3'-phosphate
  modified_base 7: mod_base = OTHER; note = 2'-deoxy-2'-fluoroguanosine-3'-phosphate
  modified_base 8: mod_base = OTHER; note = 2'-O-methyladenosine-3'-phosphate
  modified_base 9: mod_base = OTHER; note = 2'-deoxy-2'-fluorouridine-3'-phosphate
  modified_base 10: mod_base = OTHER; note = 2'-deoxy-2'-fluorocytidine-3'-phosphate
  modified_base 11: mod_base = OTHER; note = 2'-deoxy-2'-fluoroadenosine-3'-phosphate
  modified_base 12: mod_base = OTHER; note = 2'-O-methyluridine-3'-phosphate
  modified_base 13: mod_base = OTHER; note = 2'-O-methylguanosine-3'-phosphate
  modified_base 14: mod_base = OTHER; note = 2'-O-methyluridine-3'-phosphate
  modified_base 15: mod_base = OTHER; note = 2'-O-methylguanosine-3'-phosphate
  modified_base 16: mod_base = OTHER; note = 2'-O-methyladenosine-3'-phosphate
  modified_base 17: mod_base = OTHER; note = 2'-O-methyladenosine-3'-phosphate
  modified_base 18: mod_base = OTHER; note = 2'-O-methylguanosine-3'-phosphate
  modified_base 19: mod_base = OTHER; note = 2'-O-methylcytidine-3'-phosphate
  modified_base 20: mod_base = OTHER; note = 2'-O-methyluridine-3'-phosphate
  modified_base 21: mod_base = OTHER; note = 2'-O-methyladenosine-3'-phosphate ((2S,4R)-1-[29-[[2-(acetylamino)-2-deoxy-beta-D-galactopyra nosyl]oxy]-14,14-bis[[3-[[3-[[5-[[2-(acetylamino)-2-deoxy-b eta-D-galactopyranosyl]oxy]-1-oxopentyl]amino]propyl]amino] -3-oxopropoxy]methyl]-1,12,19,25-tetraoxo-16-oxa-13,20,24-t riazanonacos-1-yl]-4-hydroxy-2-pyrrolidinyl)methyl ester
gaaactgatcatgtgaagcta

SEQ ID NO: 195 - RNA, 21 nt, synthetic construct
  source 1..21: mol_type = other RNA
  modified_base 1: mod_base = OTHER; note = 2'-O-methyladenosine-3'-phosphorothioate
  modified_base 2: mod_base = OTHER; note = 2'-O-methylcytidine-3'-phosphorothioate
  modified_base 3: mod_base = OTHER; note = 2'-O-methylcytidine-3'-phosphate
  modified_base 4: mod_base = OTHER; note = 2'-O-methyluridine-3'-phosphate
  modified_base 5: mod_base = OTHER; note = 2'-O-methylcytidine-3'-phosphate
  modified_base 6: mod_base = OTHER; note = 2'-O-methyluridine-3'-phosphate
  modified_base 7: mod_base = OTHER; note = 2'-deoxy-2'-fluoroguanosine-3'-phosphate
  modified_base 8: mod_base = OTHER; note = 2'-O-methylcytidine-3'-phosphate
  modified_base 9: mod_base = OTHER; note = 2'-deoxy-2'-fluoroadenosine-3'-phosphate
  modified_base 10: mod_base = OTHER; note = 2'-deoxy-2'-fluoroguanosine-3'-phosphate
  modified_base 11: mod_base = OTHER; note = 2'-deoxy-2'-fluoroadenosine-3'-phosphate
  modified_base 12: mod_base = OTHER; note = 2'-O-methyladenosine-3'-phosphate
  modified_base 13: mod_base = OTHER; note = 2'-O-methyluridine-3'-phosphate
  modified_base 14: mod_base = OTHER; note = 2'-O-methyluridine-3'-phosphate
  modified_base 15: mod_base = OTHER; note = 2'-O-methyluridine-3'-phosphate
  modified_base 16: mod_base = OTHER; note = 2'-O-methyluridine-3'-phosphate
  modified_base 17: mod_base = OTHER; note = 2'-O-methyladenosine-3'-phosphate
  modified_base 18: mod_base = OTHER; note = 2'-O-methylcytidine-3'-phosphate
  modified_base 19: mod_base = OTHER; note = 2'-O-methyladenosine-3'-phosphate
  modified_base 20: mod_base = OTHER; note = 2'-O-methylcytidine-3'-phosphate
  modified_base 21: mod_base = OTHER; note = 2'-O-methyladenosine-3'-phosphate ((2S,4R)-1-[29-[[2-(acetylamino)-2-deoxy-beta-D-galactopyra nosyl]oxy]-14,14-bis[[3-[[3-[[5-[[2-(acetylamino)-2-deoxy-b eta-D-galactopyranosyl]oxy]-1-oxopentyl]amino]propyl]amino] -3-oxopropoxy]methyl]-1,12,19,25-tetraoxo-16-oxa-13,20,24-t riazanonacos-1-yl]-4-hydroxy-2-pyrrolidinyl)methyl ester
acctctgcagaattttacaca

SEQ ID NO: 196 - RNA, 21 nt, synthetic construct
  source 1..21: mol_type = other RNA
  modified_base 1: mod_base = OTHER; note = 2'-O-methylguanosine-3'-phosphorothioate
  modified_base 2: mod_base = OTHER; note = 2'-O-methylcytidine-3'-phosphorothioate
  modified_base 3: mod_base = OTHER; note = 2'-O-methyladenosine-3'-phosphate
  modified_base 4: mod_base = OTHER; note = 2'-O-methylguanosine-3'-phosphate
  modified_base 5: mod_base = OTHER; note = 2'-O-methyladenosine-3'-phosphate
  modified_base 6: mod_base = OTHER; note = 2'-O-methyladenosine-3'-phosphate
  modified_base 7: mod_base = OTHER; note = 2'-deoxy-2'-fluorouridine-3'-phosphate
  modified_base 8: mod_base = OTHER; note = 2'-O-methyluridine-3'-phosphate
  modified_base 9: mod_base = OTHER; note = 2'-deoxy-2'-fluorouridine-3'-phosphate
  modified_base 10: mod_base = OTHER; note = 2'-deoxy-2'-fluorouridine-3'-phosphate
  modified_base 11: mod_base = OTHER; note = 2'-deoxy-2'-fluoroadenosine-3'-phosphate
  modified_base 12: mod_base = OTHER; note = 2'-O-methylcytidine-3'-phosphate
  modified_base 13: mod_base = OTHER; note = 2'-O-methyladenosine-3'-phosphate
  modified_base 14: mod_base = OTHER; note = 2'-O-methylcytidine-3'-phosphate
  modified_base 15: mod_base = OTHER; note = 2'-O-methyluridine-3'-phosphate
  modified_base 16: mod_base = OTHER; note = 2'-O-methylguanosine-3'-phosphate
  modified_base 17: mod_base = OTHER; note = 2'-O-methyluridine-3'-phosphate
  modified_base 18: mod_base = OTHER; note = 2'-O-methylguanosine-3'-phosphate
  modified_base 19: mod_base = OTHER; note = 2'-O-methyluridine-3'-phosphate
  modified_base 20: mod_base = OTHER; note = 2'-O-methyluridine-3'-phosphate
  modified_base 21: mod_base = OTHER; note = 2'-O-methyladenosine-3'-phosphate ((2S,4R)-1-[29-[[2-(acetylamino)-2-deoxy-beta-D-galactopyra nosyl]oxy]-14,14-bis[[3-[[3-[[5-[[2-(acetylamino)-2-deoxy-b eta-D-galactopyranosyl]oxy]-1-oxopentyl]amino]propyl]amino] -3-oxopropoxy]methyl]-1,12,19,25-tetraoxo-16-oxa-13,20,24-t riazanonacos-1-yl]-4-hydroxy-2-pyrrolidinyl)methyl ester
gcagaattttacactgtgtta

SEQ ID NO: 197 - RNA, 21 nt, synthetic construct
  source 1..21: mol_type = other RNA
  modified_base 1: mod_base = OTHER; note = 2'-O-methylcytidine-3'-phosphorothioate
  modified_base 2: mod_base = OTHER; note = 2'-O-methyladenosine-3'-phosphorothioate
  modified_base 3: mod_base = OTHER; note = 2'-O-methylguanosine-3'-phosphate
  modified_base 4: mod_base = OTHER; note = 2'-O-methyladenosine-3'-phosphate
  modified_base 5: mod_base = OTHER; note = 2'-O-methyladenosine-3'-phosphate
  modified_base 6: mod_base = OTHER; note = 2'-O-methyluridine-3'-phosphate
  modified_base 7: mod_base = OTHER; note = 2'-deoxy-2'-fluorouridine-3'-phosphate
  modified_base 8: mod_base = OTHER; note = 2'-O-methyluridine-3'-phosphate
  modified_base 9: mod_base = OTHER; note = 2'-deoxy-2'-fluorouridine-3'-phosphate
  modified_base 10: mod_base = OTHER; note = 2'-deoxy-2'-fluoroadenosine-3'-phosphate
  modified_base 11: mod_base = OTHER; note = 2'-deoxy-2'-fluorocytidine-3'-phosphate
  modified_base 12: mod_base = OTHER; note = 2'-O-methyladenosine-3'-phosphate
  modified_base 13: mod_base = OTHER; note = 2'-O-methylcytidine-3'-phosphate
  modified_base 14: mod_base = OTHER; note = 2'-O-methyluridine-3'-phosphate
  modified_base 15: mod_base = OTHER; note = 2'-O-methylguanosine-3'-phosphate
  modified_base 16: mod_base = OTHER; note = 2'-O-methyluridine-3'-phosphate
  modified_base 17: mod_base = OTHER; note = 2'-O-methylguanosine-3'-phosphate
  modified_base 18: mod_base = OTHER; note = 2'-O-methyluridine-3'-phosphate
  modified_base 19: mod_base = OTHER; note = 2'-O-methyluridine-3'-phosphate
  modified_base 20: mod_base = OTHER; note = 2'-O-methyluridine-3'-phosphate
  modified_base 21: mod_base = OTHER; note = 2'-O-methyladenosine-3'-phosphate ((2S,4R)-1-[29-[[2-(acetylamino)-2-deoxy-beta-D-galactopyra nosyl]oxy]-14,14-bis[[3-[[3-[[5-[[2-(acetylamino)-2-deoxy-b eta-D-galactopyranosyl]oxy]-1-oxopentyl]amino]propyl]amino] -3-oxopropoxy]methyl]-1,12,19,25-tetraoxo-16-oxa-13,20,24-t riazanonacos-1-yl]-4-hydroxy-2-pyrrolidinyl)methyl ester
cagaattttacactgtgttta

SEQ ID NO: 198 - RNA, 21 nt, synthetic construct
  source 1..21: mol_type = other RNA
  modified_base 1: mod_base = OTHER; note = 2'-O-methyluridine-3'-phosphorothioate
  modified_base 2: mod_base = OTHER; note = 2'-O-methyladenosine-3'-phosphorothioate
  modified_base 3: mod_base = OTHER; note = 2'-O-methyladenosine-3'-phosphate
  modified_base 4: mod_base = OTHER; note = 2'-O-methyluridine-3'-phosphate
  modified_base 5: mod_base = OTHER; note = 2'-O-methylguanosine-3'-phosphate
  modified_base 6: mod_base = OTHER; note = 2'-O-methyladenosine-3'-phosphate
  modified_base 7: mod_base = OTHER; note = 2'-deoxy-2'-fluoroguanosine-3'-phosphate
  modified_base 8: mod_base = OTHER; note = 2'-O-methylcytidine-3'-phosphate
  modified_base 9: mod_base = OTHER; note = 2'-deoxy-2'-fluorouridine-3'-phosphate
  modified_base 10: mod_base = OTHER; note = 2'-deoxy-2'-fluoroadenosine-3'-phosphate
  modified_base 11: mod_base = OTHER; note = 2'-deoxy-2'-fluorocytidine-3'-phosphate
  modified_base 12: mod_base = OTHER; note = 2'-O-methyluridine-3'-phosphate
  modified_base 13: mod_base = OTHER; note = 2'-O-methyladenosine-3'-phosphate
  modified_base 14: mod_base = OTHER; note = 2'-O-methylguanosine-3'-phosphate
  modified_base 15: mod_base = OTHER; note = 2'-O-methyluridine-3'-phosphate
  modified_base 16: mod_base = OTHER; note = 2'-O-methyluridine-3'-phosphate
  modified_base 17: mod_base = OTHER; note = 2'-O-methyluridine-3'-phosphate
  modified_base 18: mod_base = OTHER; note = 2'-O-methyladenosine-3'-phosphate
  modified_base 19: mod_base = OTHER; note = 2'-O-methyluridine-3'-phosphate
  modified_base 20: mod_base = OTHER; note = 2'-O-methyladenosine-3'-phosphate
  modified_base 21: mod_base = OTHER; note = 2'-O-methyladenosine-3'-phosphate ((2S,4R)-1-[29-[[2-(acetylamino)-2-deoxy-beta-D-galactopyra nosyl]oxy]-14,14-bis[[3-[[3-[[5-[[2-(acetylamino)-2-deoxy-b eta-D-galactopyranosyl]oxy]-1-oxopentyl]amino]propyl]amino] -3-oxopropoxy]methyl]-1,12,19,25-tetraoxo-16-oxa-13,20,24-t riazanonacos-1-yl]-4-hydroxy-2-pyrrolidinyl)methyl ester
taatgagctactagtttataa

SEQ ID NO: 199 - RNA, 21 nt, synthetic construct
  source 1..21: mol_type = other RNA
  modified_base 1: mod_base = OTHER; note = 2'-O-methyladenosine-3'-phosphorothioate
  modified_base 2: mod_base = OTHER; note = 2'-O-methyladenosine-3'-phosphorothioate
  modified_base 3: mod_base = OTHER; note = 2'-O-methyluridine-3'-phosphate
  modified_base 4: mod_base = OTHER; note = 2'-O-methylguanosine-3'-phosphate
  modified_base 5: mod_base = OTHER; note = 2'-O-methyladenosine-3'-phosphate
  modified_base 6: mod_base = OTHER; note = 2'-O-methylguanosine-3'-phosphate
  modified_base 7: mod_base = OTHER; note = 2'-deoxy-2'-fluorocytidine-3'-phosphate
  modified_base 8: mod_base = OTHER; note = 2'-O-methyluridine-3'-phosphate
  modified_base 9: mod_base = OTHER; note = 2'-deoxy-2'-fluoroadenosine-3'-phosphate
  modified_base 10: mod_base = OTHER; note = 2'-deoxy-2'-fluorocytidine-3'-phosphate
  modified_base 11: mod_base = OTHER; note = 2'-deoxy-2'-fluorouridine-3'-phosphate
  modified_base 12: mod_base = OTHER; note = 2'-O-methyladenosine-3'-phosphate
  modified_base 13: mod_base = OTHER; note = 2'-O-methylguanosine-3'-phosphate
  modified_base 14: mod_base = OTHER; note = 2'-O-methyluridine-3'-phosphate
  modified_base 15: mod_base = OTHER; note = 2'-O-methyluridine-3'-phosphate
  modified_base 16: mod_base = OTHER; note = 2'-O-methyluridine-3'-phosphate
  modified_base 17: mod_base = OTHER; note = 2'-O-methyladenosine-3'-phosphate
  modified_base 18: mod_base = OTHER; note = 2'-O-methyluridine-3'-phosphate
  modified_base 19: mod_base = OTHER; note = 2'-O-methyladenosine-3'-phosphate
  modified_base 20: mod_base = OTHER; note = 2'-O-methyladenosine-3'-phosphate
  modified_base 21: mod_base = OTHER; note = 2'-O-methyladenosine-3'-phosphate ((2S,4R)-1-[29-[[2-(acetylamino)-2-deoxy-beta-D-galactopyra nosyl]oxy]-14,14-bis[[3-[[3-[[5-[[2-(acetylamino)-2-deoxy-b eta-D-galactopyranosyl]oxy]-1-oxopentyl]amino]propyl]amino] -3-oxopropoxy]methyl]-1,12,19,25-tetraoxo-16-oxa-13,20,24-t riazanonacos-1-yl]-4-hydroxy-2-pyrrolidinyl)methyl ester
aatgagctactagtttataaa

SEQ ID NO: 200 - RNA, 21 nt, synthetic construct
  source 1..21: mol_type = other RNA
  modified_base 1: mod_base = OTHER; note = 2'-O-methyladenosine-3'-phosphorothioate
  modified_base 2: mod_base = OTHER; note = 2'-O-methyluridine-3'-phosphorothioate
  modified_base 3: mod_base = OTHER; note = 2'-O-methylguanosine-3'-phosphate
  modified_base 4: mod_base = OTHER; note = 2'-O-methyladenosine-3'-phosphate
  modified_base 5: mod_base = OTHER; note = 2'-O-methylguanosine-3'-phosphate
  modified_base 6: mod_base = OTHER; note = 2'-O-methylcytidine-3'-phosphate
  modified_base 7: mod_base = OTHER; note = 2'-deoxy-2'-fluorouridine-3'-phosphate
  modified_base 8: mod_base = OTHER; note = 2'-O-methyladenosine-3'-phosphate
  modified_base 9: mod_base = OTHER; note = 2'-deoxy-2'-fluorocytidine-3'-phosphate
  modified_base 10: mod_base = OTHER; note = 2'-deoxy-2'-fluorouridine-3'-phosphate
  modified_base 11: mod_base = OTHER; note = 2'-deoxy-2'-fluoroadenosine-3'-phosphate
  modified_base 12: mod_base = OTHER; note = 2'-O-methylguanosine-3'-phosphate
  modified_base 13: mod_base = OTHER; note = 2'-O-methyluridine-3'-phosphate
  modified_base 14: mod_base = OTHER; note = 2'-O-methyluridine-3'-phosphate
  modified_base 15: mod_base = OTHER; note = 2'-O-methyluridine-3'-phosphate
  modified_base 16: mod_base = OTHER; note = 2'-O-methyladenosine-3'-phosphate
  modified_base 17: mod_base = OTHER; note = 2'-O-methyluridine-3'-phosphate
  modified_base 18: mod_base = OTHER; note = 2'-O-methyladenosine-3'-phosphate
  modified_base 19: mod_base = OTHER; note = 2'-O-methyladenosine-3'-phosphate
  modified_base 20: mod_base = OTHER; note = 2'-O-methyladenosine-3'-phosphate
  modified_base 21: mod_base = OTHER; note = 2'-O-methyladenosine-3'-phosphate ((2S,4R)-1-[29-[[2-(acetylamino)-2-deoxy-beta-D-galactopyra nosyl]oxy]-14,14-bis[[3-[[3-[[5-[[2-(acetylamino)-2-deoxy-b eta-D-galactopyranosyl]oxy]-1-oxopentyl]amino]propyl]amino] -3-oxopropoxy]methyl]-1,12,19,25-tetraoxo-16-oxa-13,20,24-t riazanonacos-1-yl]-4-hydroxy-2-pyrrolidinyl)methyl ester
atgagctactagtttataaaa

SEQ ID NO: 201 - RNA, 21 nt, synthetic construct
  source 1..21: mol_type = other RNA
  modified_base 1: mod_base = OTHER; note = 2'-O-methyluridine-3'-phosphorothioate
  modified_base 2: mod_base = OTHER; note = 2'-O-methylguanosine-3'-phosphorothioate
  modified_base 3: mod_base = OTHER; note = 2'-O-methyladenosine-3'-phosphate
  modified_base 4: mod_base = OTHER; note = 2'-O-methylguanosine-3'-phosphate
  modified_base 5: mod_base = OTHER; note = 2'-O-methylcytidine-3'-phosphate
  modified_base 6: mod_base = OTHER; note = 2'-O-methyluridine-3'-phosphate
  modified_base 7: mod_base = OTHER; note = 2'-deoxy-2'-fluoroadenosine-3'-phosphate
  modified_base 8: mod_base = OTHER; note = 2'-O-methylcytidine-3'-phosphate
  modified_base 9: mod_base = OTHER; note = 2'-deoxy-2'-fluorouridine-3'-phosphate
  modified_base 10: mod_base = OTHER; note = 2'-deoxy-2'-fluoroadenosine-3'-phosphate
  modified_base 11: mod_base = OTHER; note = 2'-deoxy-2'-fluoroguanosine-3'-phosphate
  modified_base 12: mod_base = OTHER; note = 2'-O-methyluridine-3'-phosphate
  modified_base 13: mod_base = OTHER; note = 2'-O-methyluridine-3'-phosphate
  modified_base 14: mod_base = OTHER; note = 2'-O-methyluridine-3'-phosphate
  modified_base 15: mod_base = OTHER; note = 2'-O-methyladenosine-3'-phosphate
  modified_base 16: mod_base = OTHER; note = 2'-O-methyluridine-3'-phosphate
  modified_base 17: mod_base = OTHER; note = 2'-O-methyladenosine-3'-phosphate
  modified_base 18: mod_base = OTHER; note = 2'-O-methyladenosine-3'-phosphate
  modified_base 19: mod_base = OTHER; note = 2'-O-methyladenosine-3'-phosphate
  modified_base 20: mod_base = OTHER; note = 2'-O-methylguanosine-3'-phosphate
  modified_base 21: mod_base = OTHER; note = 2'-O-methyladenosine-3'-phosphate ((2S,4R)-1-[29-[[2-(acetylamino)-2-deoxy-beta-D-galactopyra nosyl]oxy]-14,14-bis[[3-[[3-[[5-[[2-(acetylamino)-2-deoxy-b eta-D-galactopyranosyl]oxy]-1-oxopentyl]amino]propyl]amino] -3-oxopropoxy]methyl]-1,12,19,25-tetraoxo-16-oxa-13,20,24-t riazanonacos-1-yl]-4-hydroxy-2-pyrrolidinyl)methyl ester
tgagctactagtttataaaga

SEQ ID NO: 202 - RNA, 21 nt, synthetic construct
  source 1..21: mol_type = other RNA
  modified_base 1: mod_base = OTHER; note = 2'-O-methylguanosine-3'-phosphorothioate
  modified_base 2: mod_base = OTHER; note = 2'-O-methyladenosine-3'-phosphorothioate
  modified_base 3: mod_base = OTHER; note = 2'-O-methylguanosine-3'-phosphate
  modified_base 4: mod_base = OTHER; note = 2'-O-methylcytidine-3'-phosphate
  modified_base 5: mod_base = OTHER; note = 2'-O-methyluridine-3'-phosphate
  modified_base 6: mod_base = OTHER; note = 2'-O-methyladenosine-3'-phosphate
  modified_base 7: mod_base = OTHER; note = 2'-deoxy-2'-fluorocytidine-3'-phosphate
  modified_base 8: mod_base = OTHER; note = 2'-O-methyluridine-3'-phosphate
  modified_base 9: mod_base = OTHER; note = 2'-deoxy-2'-fluoroadenosine-3'-phosphate
  modified_base 10: mod_base = OTHER; note = 2'-deoxy-2'-fluoroguanosine-3'-phosphate
  modified_base 11: mod_base = OTHER; note = 2'-deoxy-2'-fluorouridine-3'-phosphate
  modified_base 12: mod_base = OTHER; note = 2'-O-methyluridine-3'-phosphate
  modified_base 13: mod_base = OTHER; note = 2'-O-methyluridine-3'-phosphate
  modified_base 14: mod_base = OTHER; note = 2'-O-methyladenosine-3'-phosphate
  modified_base 15: mod_base = OTHER; note = 2'-O-methyluridine-3'-phosphate
  modified_base 16: mod_base = OTHER; note = 2'-O-methyladenosine-3'-phosphate
  modified_base 17: mod_base = OTHER; note = 2'-O-methyladenosine-3'-phosphate
  modified_base 18: mod_base = OTHER; note = 2'-O-methyladenosine-3'-phosphate
  modified_base 19: mod_base = OTHER; note = 2'-O-methylguanosine-3'-phosphate
  modified_base 20: mod_base = OTHER; note = 2'-O-methyladenosine-3'-phosphate
  modified_base 21: mod_base = OTHER; note = 2'-O-methyladenosine-3'-phosphate ((2S,4R)-1-[29-[[2-(acetylamino)-2-deoxy-beta-D-galactopyra nosyl]oxy]-14,14-bis[[3-[[3-[[5-[[2-(acetylamino)-2-deoxy-b eta-D-galactopyranosyl]oxy]-1-oxopentyl]amino]propyl]amino] -3-oxopropoxy]methyl]-1,12,19,25-tetraoxo-16-oxa-13,20,24-t riazanonacos-1-yl]-4-hydroxy-2-pyrrolidinyl)methyl ester
gagctactagtttataaagaa

SEQ ID NO: 203 - RNA, 21 nt, synthetic construct
  source 1..21: mol_type = other RNA
  modified_base 1: mod_base = OTHER; note = 2'-O-methyladenosine-3'-phosphorothioate
  modified_base 2: mod_base = OTHER; note = 2'-O-methylguanosine-3'-phosphorothioate
  modified_base 3: mod_base = OTHER; note = 2'-O-methylcytidine-3'-phosphate
  modified_base 4: mod_base = OTHER; note = 2'-O-methyluridine-3'-phosphate
  modified_base 5: mod_base = OTHER; note = 2'-O-methyladenosine-3'-phosphate
  modified_base 6: mod_base = OTHER; note = 2'-O-methylcytidine-3'-phosphate
  modified_base 7: mod_base = OTHER; note = 2'-deoxy-2'-fluorouridine-3'-phosphate
  modified_base 8: mod_base = OTHER; note = 2'-O-methyladenosine-3'-phosphate
  modified_base 9: mod_base = OTHER; note = 2'-deoxy-2'-fluoroguanosine-3'-phosphate
  modified_base 10: mod_base = OTHER; note = 2'-deoxy-2'-fluorouridine-3'-phosphate
  modified_base 11: mod_base = OTHER; note = 2'-deoxy-2'-fluorouridine-3'-phosphate
  modified_base 12: mod_base = OTHER; note = 2'-O-methyluridine-3'-phosphate
  modified_base 13: mod_base = OTHER; note = 2'-O-methyladenosine-3'-phosphate
  modified_base 14: mod_base = OTHER; note = 2'-O-methyluridine-3'-phosphate
  modified_base 15: mod_base = OTHER; note = 2'-O-methyladenosine-3'-phosphate
  modified_base 16: mod_base = OTHER; note = 2'-O-methyladenosine-3'-phosphate
  modified_base 17: mod_base = OTHER; note = 2'-O-methyladenosine-3'-phosphate
  modified_base 18: mod_base = OTHER; note = 2'-O-methylguanosine-3'-phosphate
  modified_base 19: mod_base = OTHER; note = 2'-O-methyladenosine-3'-phosphate
  modified_base 20: mod_base = OTHER; note = 2'-O-methyladenosine-3'-phosphate
  modified_base 21: mod_base = OTHER; note = 2'-O-methyladenosine-3'-phosphate ((2S,4R)-1-[29-[[2-(acetylamino)-2-deoxy-beta-D-galactopyra nosyl]oxy]-14,14-bis[[3-[[3-[[5-[[2-(acetylamino)-2-deoxy-b eta-D-galactopyranosyl]oxy]-1-oxopentyl]amino]propyl]amino] -3-oxopropoxy]methyl]-1,12,19,25-tetraoxo-16-oxa-13,20,24-t riazanonacos-1-yl]-4-hydroxy-2-pyrrolidinyl)methyl ester
agctactagtttataaagaaa

SEQ ID NO: 204 - RNA, 21 nt, synthetic construct
  source 1..21: mol_type = other RNA
  modified_base 1: mod_base = OTHER; note = 2'-O-methyluridine-3'-phosphorothioate
  modified_base 2: mod_base = OTHER; note = 2'-O-methylguanosine-3'-phosphorothioate
  modified_base 3: mod_base = OTHER; note = 2'-O-methyluridine-3'-phosphate
  modified_base 4: mod_base = OTHER; note = 2'-O-methyluridine-3'-phosphate
  modified_base 5: mod_base = OTHER; note = 2'-O-methyluridine-3'-phosphate
  modified_base 6: mod_base = OTHER; note = 2'-O-methylcytidine-3'-phosphate
  modified_base 7: mod_base = OTHER; note = 2'-deoxy-2'-fluorocytidine-3'-phosphate
  modified_base 8: mod_base = OTHER; note = 2'-O-methylguanosine-3'-phosphate
  modified_base 9: mod_base = OTHER; note = 2'-deoxy-2'-fluoroadenosine-3'-phosphate
  modified_base 10: mod_base = OTHER; note = 2'-deoxy-2'-fluoroadenosine-3'-phosphate
  modified_base 11: mod_base = OTHER; note = 2'-deoxy-2'-fluorocytidine-3'-phosphate
  modified_base 12: mod_base = OTHER; note = 2'-O-methylcytidine-3'-phosphate
  modified_base 13: mod_base = OTHER; note = 2'-O-methyluridine-3'-phosphate
  modified_base 14: mod_base = OTHER; note = 2'-O-methyladenosine-3'-phosphate
  modified_base 15: mod_base = OTHER; note = 2'-O-methylcytidine-3'-phosphate
  modified_base 16: mod_base = OTHER; note = 2'-O-methyladenosine-3'-phosphate
  modified_base 17: mod_base = OTHER; note = 2'-O-methylguanosine-3'-phosphate
  modified_base 18: mod_base = OTHER; note = 2'-O-methyluridine-3'-phosphate
  modified_base 19: mod_base = OTHER; note = 2'-O-methylguanosine-3'-phosphate
  modified_base 20: mod_base = OTHER; note = 2'-O-methyladenosine-3'-phosphate
  modified_base 21: mod_base = OTHER; note = 2'-O-methyladenosine-3'-phosphate ((2S,4R)-1-[29-[[2-(acetylamino)-2-deoxy-beta-D-galactopyra nosyl]oxy]-14,14-bis[[3-[[3-[[5-[[2-(acetylamino)-2-deoxy-b eta-D-galactopyranosyl]oxy]-1-oxopentyl]amino]propyl]amino] -3-oxopropoxy]methyl]-1,12,19,25-tetraoxo-16-oxa-13,20,24-t riazanonacos-1-yl]-4-hydroxy-2-pyrrolidinyl)methyl ester
tgtttccgaacctacagtgaa

SEQ ID NO: 205 - RNA, 21 nt, synthetic construct
  source 1..21: mol_type = other RNA
  modified_base 1: mod_base = OTHER; note = 2'-O-methylcytidine-3'-phosphorothioate
  modified_base 2: mod_base = OTHER; note = 2'-O-methyluridine-3'-phosphorothioate
  modified_base 3: mod_base = OTHER; note = 2'-O-methyladenosine-3'-phosphate
  modified_base 4: mod_base = OTHER; note = 2'-O-methylcytidine-3'-phosphate
  modified_base 5: mod_base = OTHER; note = 2'-O-methyluridine-3'-phosphate
  modified_base 6: mod_base = OTHER; note = 2'-O-methyladenosine-3'-phosphate
  modified_base 7: mod_base = OTHER; note = 2'-deoxy-2'-fluoroguanosine-3'-phosphate
  modified_base 8: mod_base = OTHER; note = 2'-O-methyluridine-3'-phosphate
  modified_base 9: mod_base = OTHER; note = 2'-deoxy-2'-fluorouridine-3'-phosphate
  modified_base 10: mod_base = OTHER; note = 2'-deoxy-2'-fluorouridine-3'-phosphate
  modified_base 11: mod_base = OTHER; note = 2'-deoxy-2'-fluoroadenosine-3'-phosphate
  modified_base 12: mod_base = OTHER; note = 2'-O-methyluridine-3'-phosphate
  modified_base 13: mod_base = OTHER; note = 2'-O-methyladenosine-3'-phosphate
  modified_base 14: mod_base = OTHER; note = 2'-O-methyladenosine-3'-phosphate
  modified_base 15: mod_base = OTHER; note = 2'-O-methyladenosine-3'-phosphate
  modified_base 16: mod_base = OTHER; note = 2'-O-methylguanosine-3'-phosphate
  modified_base 17: mod_base = OTHER; note = 2'-O-methyladenosine-3'-phosphate
  modified_base 18: mod_base = OTHER; note = 2'-O-methyladenosine-3'-phosphate
  modified_base 19: mod_base = OTHER; note = 2'-O-methyladenosine-3'-phosphate
  modified_base 20: mod_base = OTHER; note = 2'-O-methylguanosine-3'-phosphate
  modified_base 21: mod_base = OTHER; note = 2'-O-methyladenosine-3'-phosphate ((2S,4R)-1-[29-[[2-(acetylamino)-2-deoxy-beta-D-galactopyra nosyl]oxy]-14,14-bis[[3-[[3-[[5-[[2-(acetylamino)-2-deoxy-b eta-D-galactopyranosyl]oxy]-1-oxopentyl]amino]propyl]amino] -3-oxopropoxy]methyl]-1,12,19,25-tetraoxo-16-oxa-13,20,24-t riazanonacos-1-yl]-4-hydroxy-2-pyrrolidinyl)methyl ester
ctactagtttataaagaaaga

SEQ ID NO: 206 - RNA, 21 nt, synthetic construct
  source 1..21: mol_type = other RNA
  modified_base 1: mod_base = OTHER; note = 2'-O-methylcytidine-3'-phosphorothioate
  modified_base 2: mod_base = OTHER; note = 2'-O-methylcytidine-3'-phosphorothioate
  modified_base 3: mod_base = OTHER; note = 2'-O-methylguanosine-3'-phosphate
  modified_base 4: mod_base = OTHER; note = 2'-O-methyladenosine-3'-phosphate
  modified_base 5: mod_base = OTHER; note = 2'-O-methyladenosine-3'-phosphate
  modified_base 6: mod_base = OTHER; note = 2'-O-methylcytidine-3'-phosphate
  modified_base 7: mod_base = OTHER; note = 2'-deoxy-2'-fluorocytidine-3'-phosphate
  modified_base 8: mod_base = OTHER; note = 2'-O-methyluridine-3'-phosphate
  modified_base 9: mod_base = OTHER; note = 2'-deoxy-2'-fluoroadenosine-3'-phosphate
  modified_base 10: mod_base = OTHER; note = 2'-deoxy-2'-fluorocytidine-3'-phosphate
  modified_base 11: mod_base = OTHER; note = 2'-deoxy-2'-fluoroadenosine-3'-phosphate
  modified_base 12: mod_base = OTHER; note = 2'-O-methylguanosine-3'-phosphate
  modified_base 13: mod_base = OTHER; note = 2'-O-methyluridine-3'-phosphate
  modified_base 14: mod_base = OTHER; note = 2'-O-methylguanosine-3'-phosphate
  modified_base 15: mod_base = OTHER; note = 2'-O-methyladenosine-3'-phosphate
  modified_base 16: mod_base = OTHER; note = 2'-O-methylcytidine-3'-phosphate
  modified_base 17: mod_base = OTHER; note = 2'-O-methylcytidine-3'-phosphate
  modified_base 18: mod_base = OTHER; note = 2'-O-methyluridine-3'-phosphate
  modified_base 19: mod_base = OTHER; note = 2'-O-methyluridine-3'-phosphate
  modified_base 20: mod_base = OTHER; note = 2'-O-methyluridine-3'-phosphate
  modified_base 21: mod_base = OTHER; note = 2'-O-methyladenosine-3'-phosphate ((2S,4R)-1-[29-[[2-(acetylamino)-2-deoxy-beta-D-galactopyra nosyl]oxy]-14,14-bis[[3-[[3-[[5-[[2-(acetylamino)-2-deoxy-b eta-D-galactopyranosyl]oxy]-1-oxopentyl]amino]propyl]amino] -3-oxopropoxy]methyl]-1,12,19,25-tetraoxo-16-oxa-13,20,24-t riazanonacos-1-yl]-4-hydroxy-2-pyrrolidinyl)methyl ester
ccgaacctacagtgaccttta

SEQ ID NO: 207 - RNA, 21 nt, synthetic construct
  source 1..21: mol_type = other RNA
  modified_base 1: mod_base = OTHER; note = 2'-O-methylguanosine-3'-phosphorothioate
  modified_base 2: mod_base = OTHER; note = 2'-O-methyluridine-3'-phosphorothioate
  modified_base 3: mod_base = OTHER; note = 2'-O-methyluridine-3'-phosphate
  modified_base 4: mod_base = OTHER; note = 2'-O-methyluridine-3'-phosphate
  modified_base 5: mod_base = OTHER; note = 2'-O-methyladenosine-3'-phosphate
  modified_base 6: mod_base = OTHER; note = 2'-O-methyluridine-3'-phosphate
  modified_base 7: mod_base = OTHER; note = 2'-deoxy-2'-fluoroadenosine-3'-phosphate
  modified_base 8: mod_base = OTHER; note = 2'-O-methyladenosine-3'-phosphate
  modified_base 9: mod_base = OTHER; note = 2'-deoxy-2'-fluoroadenosine-3'-phosphate
  modified_base 10: mod_base = OTHER; note = 2'-deoxy-2'-fluoroguanosine-3'-phosphate
  modified_base 11: mod_base = OTHER; note = 2'-deoxy-2'-fluoroadenosine-3'-phosphate
  modified_base 12: mod_base = OTHER; note = 2'-O-methyladenosine-3'-phosphate
  modified_base 13: mod_base = OTHER; note = 2'-O-methyladenosine-3'-phosphate
  modified_base 14: mod_base = OTHER; note = 2'-O-methylguanosine-3'-phosphate
  modified_base 15: mod_base = OTHER; note = 2'-O-methyladenosine-3'-phosphate
  modified_base 16: mod_base = OTHER; note = 2'-O-methylguanosine-3'-phosphate
  modified_base 17: mod_base = OTHER; note = 2'-O-methyluridine-3'-phosphate
  modified_base 18: mod_base = OTHER; note = 2'-O-methyluridine-3'-phosphate
  modified_base 19: mod_base = OTHER; note = 2'-O-methylguanosine-3'-phosphate
  modified_base 20: mod_base = OTHER; note = 2'-O-methylguanosine-3'-phosphate
  modified_base 21: mod_base = OTHER; note = 2'-O-methyladenosine-3'-phosphate ((2S,4R)-1-[29-[[2-(acetylamino)-2-deoxy-beta-D-galactopyra nosyl]oxy]-14,14-bis[[3-[[3-[[5-[[2-(acetylamino)-2-deoxy-b eta-D-galactopyranosyl]oxy]-1-oxopentyl]amino]propyl]amino] -3-oxopropoxy]methyl]-1,12,19,25-tetraoxo-16-oxa-13,20,24-t riazanonacos-1-yl]-4-hydroxy-2-pyrrolidinyl)methyl ester
gtttataaagaaagagttgga

SEQ ID NO: 208 - RNA, 21 nt, synthetic construct
  source 1..21: mol_type = other RNA
  modified_base 1: mod_base = OTHER; note = 2'-O-methyluridine-3'-phosphorothioate
  modified_base 2: mod_base = OTHER; note = 2'-O-methyladenosine-3'-phosphorothioate
  modified_base 3: mod_base = OTHER; note = 2'-O-methyladenosine-3'-phosphate
  modified_base 4: mod_base = OTHER; note = 2'-O-methyladenosine-3'-phosphate
  modified_base 5: mod_base = OTHER; note = 2'-O-methylguanosine-3'-phosphate
  modified_base 6: mod_base = OTHER; note = 2'-O-methyladenosine-3'-phosphate
  modified_base 7: mod_base = OTHER; note = 2'-deoxy-2'-fluoroadenosine-3'-phosphate
  modified_base 8: mod_base = OTHER; note = 2'-O-methyladenosine-3'-phosphate
  modified_base 9: mod_base = OTHER; note = 2'-deoxy-2'-fluoroguanosine-3'-phosphate
  modified_base 10: mod_base = OTHER; note = 2'-deoxy-2'-fluoroadenosine-3'-phosphate
  modified_base 11: mod_base = OTHER; note = 2'-deoxy-2'-fluoroguanosine-3'-phosphate
  modified_base 12: mod_base = OTHER; note = 2'-O-methyluridine-3'-phosphate
  modified_base 13: mod_base = OTHER; note = 2'-O-methyluridine-3'-phosphate
  modified_base 14: mod_base = OTHER; note = 2'-O-methylguanosine-3'-phosphate
  modified_base 15: mod_base = OTHER; note = 2'-O-methylguanosine-3'-phosphate
  modified_base 16: mod_base = OTHER; note = 2'-O-methyladenosine-3'-phosphate
  modified_base 17: mod_base = OTHER; note = 2'-O-methylguanosine-3'-phosphate
  modified_base 18: mod_base = OTHER; note = 2'-O-methyladenosine-3'-phosphate
  modified_base 19: mod_base = OTHER; note = 2'-O-methylguanosine-3'-phosphate
  modified_base 20: mod_base = OTHER; note = 2'-O-methyluridine-3'-phosphate
  modified_base 21: mod_base = OTHER; note = 2'-O-methyladenosine-3'-phosphate ((2S,4R)-1-[29-[[2-(acetylamino)-2-deoxy-beta-D-galactopyra nosyl]oxy]-14,14-bis[[3-[[3-[[5-[[2-(acetylamino)-2-deoxy-b eta-D-galactopyranosyl]oxy]-1-oxopentyl]amino]propyl]amino] -3-oxopropoxy]methyl]-1,12,19,25-tetraoxo-16-oxa-13,20,24-t riazanonacos-1-yl]-4-hydroxy-2-pyrrolidinyl)methyl ester
taaagaaagagttggagagta

SEQ ID NO: 209 - RNA, 21 nt, synthetic construct
  source 1..21: mol_type = other RNA
  modified_base 1: mod_base = OTHER; note = 2'-O-methylguanosine-3'-phosphorothioate
  modified_base 2: mod_base = OTHER; note = 2'-O-methyluridine-3'-phosphorothioate
  modified_base 3: mod_base = OTHER; note = 2'-O-methyluridine-3'-phosphate
  modified_base 4: mod_base = OTHER; note = 2'-O-methylguanosine-3'-phosphate
  modified_base 5: mod_base = OTHER; note = 2'-O-methylguanosine-3'-phosphate
  modified_base 6: mod_base = OTHER; note = 2'-O-methyladenosine-3'-phosphate
  modified_base 7: mod_base = OTHER; note = 2'-deoxy-2'-fluoroguanosine-3'-phosphate
  modified_base 8: mod_base = OTHER; note = 2'-O-methyladenosine-3'-phosphate
  modified_base 9: mod_base = OTHER; note = 2'-deoxy-2'-fluoroguanosine-3'-phosphate
  modified_base 10: mod_base = OTHER; note = 2'-deoxy-2'-fluorouridine-3'-phosphate
  modified_base 11: mod_base = OTHER; note = 2'-deoxy-2'-fluoroadenosine-3'-phosphate
  modified_base 12: mod_base = OTHER; note = 2'-O-methyluridine-3'-phosphate
  modified_base 13: mod_base = OTHER; note = 2'-O-methyladenosine-3'-phosphate
  modified_base 14: mod_base = OTHER; note = 2'-O-methylguanosine-3'-phosphate
  modified_base 15: mod_base = OTHER; note = 2'-O-methyluridine-3'-phosphate
  modified_base 16: mod_base = OTHER; note = 2'-O-methylcytidine-3'-phosphate
  modified_base 17: mod_base = OTHER; note = 2'-O-methyluridine-3'-phosphate
  modified_base 18: mod_base = OTHER; note = 2'-O-methyladenosine-3'-phosphate
  modified_base 19: mod_base = OTHER; note = 2'-O-methyluridine-3'-phosphate
  modified_base 20: mod_base = OTHER; note = 2'-O-methyladenosine-3'-phosphate
  modified_base 21: mod_base = OTHER; note = 2'-O-methyladenosine-3'-phosphate ((2S,4R)-1-[29-[[2-(acetylamino)-2-deoxy-beta-D-galactopyra nosyl]oxy]-14,14-bis[[3-[[3-[[5-[[2-(acetylamino)-2-deoxy-b eta-D-galactopyranosyl]oxy]-1-oxopentyl]amino]propyl]amino] -3-oxopropoxy]methyl]-1,12,19,25-tetraoxo-16-oxa-13,20,24-t riazanonacos-1-yl]-4-hydroxy-2-pyrrolidinyl)methyl ester
gttggagagtatagtctataa

SEQ ID NO: 210 - RNA, 21 nt, synthetic construct
  source 1..21: mol_type = other RNA
  modified_base 1: mod_base = OTHER; note = 2'-O-methyladenosine-3'-phosphorothioate
  modified_base 2: mod_base = OTHER; note = 2'-O-methylguanosine-3'-phosphorothioate
  modified_base 3: mod_base = OTHER; note = 2'-O-methyluridine-3'-phosphate
  modified_base 4: mod_base = OTHER; note = 2'-O-methyladenosine-3'-phosphate
  modified_base 5: mod_base = OTHER; note = 2'-O-methyluridine-3'-phosphate
  modified_base 6: mod_base = OTHER; note = 2'-O-methyladenosine-3'-phosphate
  modified_base 7: mod_base = OTHER; note = 2'-deoxy-2'-fluoroguanosine-3'-phosphate
  modified_base 8: mod_base = OTHER; note = 2'-O-methyluridine-3'-phosphate
  modified_base 9: mod_base = OTHER; note = 2'-deoxy-2'-fluorocytidine-3'-phosphate
  modified_base 10: mod_base = OTHER; note = 2'-deoxy-2'-fluorouridine-3'-phosphate
  modified_base 11: mod_base = OTHER; note = 2'-deoxy-2'-fluoroadenosine-3'-phosphate
  modified_base 12: mod_base = OTHER; note = 2'-O-methyluridine-3'-phosphate
  modified_base 13: mod_base = OTHER; note = 2'-O-methyladenosine-3'-phosphate
  modified_base 14: mod_base = OTHER; note = 2'-O-methylcytidine-3'-phosphate
  modified_base 15: mod_base = OTHER; note = 2'-O-methyladenosine-3'-phosphate
  modified_base 16: mod_base = OTHER; note = 2'-O-methyluridine-3'-phosphate
  modified_base 17: mod_base = OTHER; note = 2'-O-methyluridine-3'-phosphate
  modified_base 18: mod_base = OTHER; note = 2'-O-methylguanosine-3'-phosphate
  modified_base 19: mod_base = OTHER; note = 2'-O-methylguanosine-3'-phosphate
  modified_base 20: mod_base = OTHER; note = 2'-O-methyladenosine-3'-phosphate
  modified_base 21: mod_base = OTHER; note = 2'-O-methyladenosine-3'-phosphate ((2S,4R)-1-[29-[[2-(acetylamino)-2-deoxy-beta-D-galactopyra nosyl]oxy]-14,14-bis[[3-[[3-[[5-[[2-(acetylamino)-2-deoxy-b eta-D-galactopyranosyl]oxy]-1-oxopentyl]amino]propyl]amino] -3-oxopropoxy]methyl]-1,12,19,25-tetraoxo-16-oxa-13,20,24-t riazanonacos-1-yl]-4-hydroxy-2-pyrrolidinyl)methyl ester
agtatagtctatacattggaa

SEQ ID NO: 211 - RNA, 21 nt, synthetic construct
  source 1..21: mol_type = other RNA
  modified_base 1: mod_base = OTHER; note = 2'-O-methyluridine-3'-phosphorothioate
  modified_base 2: mod_base = OTHER; note = 2'-O-methyladenosine-3'-phosphorothioate
  modified_base 3: mod_base = OTHER; note = 2'-O-methylguanosine-3'-phosphate
  modified_base 4: mod_base = OTHER; note = 2'-O-methyluridine-3'-phosphate
  modified_base 5: mod_base = OTHER; note = 2'-O-methylcytidine-3'-phosphate
  modified_base 6: mod_base = OTHER; note = 2'-O-methyluridine-3'-phosphate
  modified_base 7: mod_base = OTHER; note = 2'-deoxy-2'-fluoroadenosine-3'-phosphate
  modified_base 8: mod_base = OTHER; note = 2'-O-methyluridine-3'-phosphate
  modified_base 9: mod_base = OTHER; note = 2'-deoxy-2'-fluoroadenosine-3'-phosphate
  modified_base 10: mod_base = OTHER; note = 2'-deoxy-2'-fluorocytidine-3'-phosphate
  modified_base 11: mod_base = OTHER; note = 2'-deoxy-2'-fluoroadenosine-3'-phosphate
  modified_base 12: mod_base = OTHER; note = 2'-O-methyluridine-3'-phosphate
  modified_base 13: mod_base = OTHER; note = 2'-O-methyluridine-3'-phosphate
  modified_base 14: mod_base = OTHER; note = 2'-O-methylguanosine-3'-phosphate
  modified_base 15: mod_base = OTHER; note = 2'-O-methylguanosine-3'-phosphate
  modified_base 16: mod_base = OTHER; note = 2'-O-methyladenosine-3'-phosphate
  modified_base 17: mod_base = OTHER; note = 2'-O-methyladenosine-3'-phosphate
  modified_base 18: mod_base = OTHER; note = 2'-O-methylguanosine-3'-phosphate
  modified_base 19: mod_base = OTHER; note = 2'-O-methyladenosine-3'-phosphate
  modified_base 20: mod_base = OTHER; note = 2'-O-methylcytidine-3'-phosphate
  modified_base 21: mod_base = OTHER; note = 2'-O-methyladenosine-3'-phosphate ((2S,4R)-1-[29-[[2-(acetylamino)-2-deoxy-beta-D-galactopyra nosyl]oxy]-14,14-bis[[3-[[3-[[5-[[2-(acetylamino)-2-deoxy-b eta-D-galactopyranosyl]oxy]-1-oxopentyl]amino]propyl]amino] -3-oxopropoxy]methyl]-1,12,19,25-tetraoxo-16-oxa-13,20,24-t riazanonacos-1-yl]-4-hydroxy-2-pyrrolidinyl)methyl ester
tagtctatacattggaagaca

SEQ ID NO: 212 - RNA, 21 nt, synthetic construct
  source 1..21: mol_type = other RNA
  modified_base 1: mod_base = OTHER; note = 2'-O-methyladenosine-3'-phosphorothioate
  modified_base 2: mod_base = OTHER; note = 2'-O-methylguanosine-3'-phosphorothioate
  modified_base 3: mod_base = OTHER; note = 2'-O-methyladenosine-3'-phosphate
  modified_base 4: mod_base = OTHER; note = 2'-O-methylguanosine-3'-phosphate
  modified_base 5: mod_base = OTHER; note = 2'-O-methyluridine-3'-phosphate
  modified_base 6: mod_base = OTHER; note = 2'-O-methylcytidine-3'-phosphate
  modified_base 7: mod_base = OTHER; note = 2'-deoxy-2'-fluorouridine-3'-phosphate
  modified_base 8: mod_base = OTHER; note = 2'-O-methyluridine-3'-phosphate
  modified_base 9: mod_base = OTHER; note = 2'-deoxy-2'-fluorouridine-3'-phosphate
  modified_base 10: mod_base = OTHER; note = 2'-deoxy-2'-fluorouridine-3'-phosphate
  modified_base 11: mod_base = OTHER; note = 2'-deoxy-2'-fluorocytidine-3'-phosphate
  modified_base 12: mod_base = OTHER; note = 2'-O-methyluridine-3'-phosphate
  modified_base 13: mod_base = OTHER; note = 2'-O-methylcytidine-3'-phosphate
  modified_base 14: mod_base = OTHER; note = 2'-O-methylcytidine-3'-phosphate
  modified_base 15: mod_base = OTHER; note = 2'-O-methyluridine-3'-phosphate
  modified_base 16: mod_base = OTHER; note = 2'-O-methyladenosine-3'-phosphate
  modified_base 17: mod_base = OTHER; note = 2'-O-methylcytidine-3'-phosphate
  modified_base 18: mod_base = OTHER; note = 2'-O-methyladenosine-3'-phosphate
  modified_base 19: mod_base = OTHER; note = 2'-O-methylguanosine-3'-phosphate
  modified_base 20: mod_base = OTHER; note = 2'-O-methyluridine-3'-phosphate
  modified_base 21: mod_base = OTHER; note = 2'-O-methyladenosine-3'-phosphate ((2S,4R)-1-[29-[[2-(acetylamino)-2-deoxy-beta-D-galactopyra nosyl]oxy]-14,14-bis[[3-[[3-[[5-[[2-(acetylamino)-2-deoxy-b eta-D-galactopyranosyl]oxy]-1-oxopentyl]amino]propyl]amino] -3-oxopropoxy]methyl]-1,12,19,25-tetraoxo-16-oxa-13,20,24-t riazanonacos-1-yl]-4-hydroxy-2-pyrrolidinyl)methyl ester
agagtcttttctcctacagta

SEQ ID NO: 213 - RNA, 21 nt, synthetic construct
  source 1..21: mol_type = other RNA
  modified_base 1: mod_base = OTHER; note = 2'-O-methyluridine-3'-phosphorothioate
  modified_base 2: mod_base = OTHER; note = 2'-O-methyladenosine-3'-phosphorothioate
  modified_base 3: mod_base = OTHER; note = 2'-O-methylcytidine-3'-phosphate
  modified_base 4: mod_base = OTHER; note = 2'-O-methyladenosine-3'-phosphate
  modified_base 5: mod_base = OTHER; note = 2'-O-methyluridine-3'-phosphate
  modified_base 6: mod_base = OTHER; note = 2'-O-methyluridine-3'-phosphate
  modified_base 7: mod_base = OTHER; note = 2'-deoxy-2'-fluoroguanosine-3'-phosphate
  modified_base 8: mod_base = OTHER; note = 2'-O-methylguanosine-3'-phosphate
  modified_base 9: mod_base = OTHER; note = 2'-deoxy-2'-fluoroadenosine-3'-phosphate
  modified_base 10: mod_base = OTHER; note = 2'-deoxy-2'-fluoroadenosine-3'-phosphate
  modified_base 11: mod_base = OTHER; note = 2'-deoxy-2'-fluoroguanosine-3'-phosphate
  modified_base 12: mod_base = OTHER; note = 2'-O-methyladenosine-3'-phosphate
  modified_base 13: mod_base = OTHER; note = 2'-O-methylcytidine-3'-phosphate
  modified_base 14: mod_base = OTHER; note = 2'-O-methyladenosine-3'-phosphate
  modified_base 15: mod_base = OTHER; note = 2'-O-methylcytidine-3'-phosphate
  modified_base 16: mod_base = OTHER; note = 2'-O-methyladenosine-3'-phosphate
  modified_base 17: mod_base = OTHER; note = 2'-O-methyladenosine-3'-phosphate
  modified_base 18: mod_base = OTHER; note = 2'-O-methyladenosine-3'-phosphate
  modified_base 19: mod_base = OTHER; note = 2'-O-methylguanosine-3'-phosphate
  modified_base 20: mod_base = OTHER; note = 2'-O-methyluridine-3'-phosphate
  modified_base 21: mod_base = OTHER; note = 2'-O-methyladenosine-3'-phosphate ((2S,4R)-1-[29-[[2-(acetylamino)-2-deoxy-beta-D-galactopyra nosyl]oxy]-14,14-bis[[3-[[3-[[5-[[2-(acetylamino)-2-deoxy-b eta-D-galactopyranosyl]oxy]-1-oxopentyl]amino]propyl]amino] -3-oxopropoxy]methyl]-1,12,19,25-tetraoxo-16-oxa-13,20,24-t riazanonacos-1-yl]-4-hydroxy-2-pyrrolidinyl)methyl ester
tacattggaagacacaaagta

SEQ ID NO: 214 - RNA, 21 nt, synthetic construct
  source 1..21: mol_type = other RNA
  modified_base 1: mod_base = OTHER; note = 2'-O-methyluridine-3'-phosphorothioate
  modified_base 2: mod_base = OTHER; note = 2'-O-methyluridine-3'-phosphorothioate
  modified_base 3: mod_base = OTHER; note = 2'-O-methylguanosine-3'-phosphate
  modified_base 4: mod_base = OTHER; note = 2'-O-methylguanosine-3'-phosphate
  modified_base 5: mod_base = OTHER; note = 2'-O-methyladenosine-3'-phosphate
  modified_base 6: mod_base = OTHER; note = 2'-O-methyladenosine-3'-phosphate
  modified_base 7: mod_base = OTHER; note = 2'-deoxy-2'-fluoroguanosine-3'-phosphate
  modified_base 8: mod_base = OTHER; note = 2'-O-methyladenosine-3'-phosphate
  modified_base 9: mod_base = OTHER; note = 2'-deoxy-2'-fluorocytidine-3'-phosphate
  modified_base 10: mod_base = OTHER; note = 2'-deoxy-2'-fluoroadenosine-3'-phosphate
  modified_base 11: mod_base = OTHER; note = 2'-deoxy-2'-fluorocytidine-3'-phosphate
  modified_base 12: mod_base = OTHER; note = 2'-O-methyladenosine-3'-phosphate
  modified_base 13: mod_base = OTHER; note = 2'-O-methyladenosine-3'-phosphate
  modified_base 14: mod_base = OTHER; note = 2'-O-methyladenosine-3'-phosphate
  modified_base 15: mod_base = OTHER; note = 2'-O-methylguanosine-3'-phosphate
  modified_base 16: mod_base = OTHER; note = 2'-O-methyluridine-3'-phosphate
  modified_base 17: mod_base = OTHER; note = 2'-O-methyluridine-3'-phosphate
  modified_base 18: mod_base = OTHER; note = 2'-O-methyladenosine-3'-phosphate
  modified_base 19: mod_base = OTHER; note = 2'-O-methylcytidine-3'-phosphate
  modified_base 20: mod_base = OTHER; note = 2'-O-methyladenosine-3'-phosphate
  modified_base 21: mod_base = OTHER; note = 2'-O-methyladenosine-3'-phosphate ((2S,4R)-1-[29-[[2-(acetylamino)-2-deoxy-beta-D-galactopyra nosyl]oxy]-14,14-bis[[3-[[3-[[5-[[2-(acetylamino)-2-deoxy-b eta-D-galactopyranosyl]oxy]-1-oxopentyl]amino]propyl]amino] -3-oxopropoxy]methyl]-1,12,19,25-tetraoxo-16-oxa-13,20,24-t riazanonacos-1-yl]-4-hydroxy-2-pyrrolidinyl)methyl ester
ttggaagacacaaagttacaa

SEQ ID NO: 215 - RNA, 21 nt, synthetic construct
  source 1..21: mol_type = other RNA
  modified_base 1: mod_base = OTHER; note = 2'-O-methyladenosine-3'-phosphorothioate
  modified_base 2: mod_base = OTHER; note = 2'-O-methylguanosine-3'-phosphorothioate
  modified_base 3: mod_base = OTHER; note = 2'-O-methyladenosine-3'-phosphate
  modified_base 4: mod_base = OTHER; note = 2'-O-methylcytidine-3'-phosphate
  modified_base 5: mod_base = OTHER; note = 2'-O-methyladenosine-3'-phosphate
  modified_base 6: mod_base = OTHER; note = 2'-O-methylcytidine-3'-phosphate
  modified_base 7: mod_base = OTHER; note = 2'-deoxy-2'-fluoroadenosine-3'-phosphate
  modified_base 8: mod_base = OTHER; note = 2'-O-methyladenosine-3'-phosphate
  modified_base 9: mod_base = OTHER; note = 2'-deoxy-2'-fluoroadenosine-3'-phosphate
  modified_base 10: mod_base = OTHER; note = 2'-deoxy-2'-fluoroguanosine-3'-phosphate
  modified_base 11: mod_base = OTHER; note = 2'-deoxy-2'-fluorouridine-3'-phosphate
  modified_base 12: mod_base = OTHER; note = 2'-O-methyluridine-3'-phosphate
  modified_base 13: mod_base = OTHER; note = 2'-O-methyladenosine-3'-phosphate
  modified_base 14: mod_base = OTHER; note = 2'-O-methylcytidine-3'-phosphate
  modified_base 15: mod_base = OTHER; note = 2'-O-methyladenosine-3'-phosphate
  modified_base 16: mod_base = OTHER; note = 2'-O-methyluridine-3'-phosphate
  modified_base 17: mod_base = OTHER; note = 2'-O-methylcytidine-3'-phosphate
  modified_base 18: mod_base = OTHER; note = 2'-O-methylcytidine-3'-phosphate
  modified_base 19: mod_base = OTHER; note = 2'-O-methyladenosine-3'-phosphate
  modified_base 20: mod_base = OTHER; note = 2'-O-methyladenosine-3'-phosphate
  modified_base 21: mod_base = OTHER; note = 2'-O-methyladenosine-3'-phosphate ((2S,4R)-1-[29-[[2-(acetylamino)-2-deoxy-beta-D-galactopyra nosyl]oxy]-14,14-bis[[3-[[3-[[5-[[2-(acetylamino)-2-deoxy-b eta-D-galactopyranosyl]oxy]-1-oxopentyl]amino]propyl]amino] -3-oxopropoxy]methyl]-1,12,19,25-tetraoxo-16-oxa-13,20,24-t riazanonacos-1-yl]-4-hydroxy-2-pyrrolidinyl)methyl ester
agacacaaagttacatccaaa

SEQ ID NO: 216 - RNA, 21 nt, synthetic construct
  source 1..21: mol_type = other RNA
  modified_base 1: mod_base = OTHER; note = 2'-O-methyladenosine-3'-phosphorothioate
  modified_base 2: mod_base = OTHER; note = 2'-O-methylcytidine-3'-phosphorothioate
  modified_base 3: mod_base = OTHER; note = 2'-O-methyladenosine-3'-phosphate
  modified_base 4: mod_base = OTHER; note = 2'-O-methyladenosine-3'-phosphate
  modified_base 5: mod_base = OTHER; note = 2'-O-methyladenosine-3'-phosphate
  modified_base 6: mod_base = OTHER; note = 2'-O-methylguanosine-3'-phosphate
  modified_base 7: mod_base = OTHER; note = 2'-deoxy-2'-fluorouridine-3'-phosphate
  modified_base 8: mod_base = OTHER; note = 2'-O-methyluridine-3'-phosphate
  modified_base 9: mod_base = OTHER; note = 2'-deoxy-2'-fluoroadenosine-3'-phosphate
  modified_base 10: mod_base = OTHER; note = 2'-deoxy-2'-fluorocytidine-3'-phosphate
  modified_base 11: mod_base = OTHER; note = 2'-deoxy-2'-fluoroadenosine-3'-phosphate
  modified_base 12: mod_base = OTHER; note = 2'-O-methyluridine-3'-phosphate
  modified_base 13: mod_base = OTHER; note = 2'-O-methylcytidine-3'-phosphate
  modified_base 14: mod_base = OTHER; note = 2'-O-methylcytidine-3'-phosphate
  modified_base 15: mod_base = OTHER; note = 2'-O-methyladenosine-3'-phosphate
  modified_base 16: mod_base = OTHER; note = 2'-O-methyladenosine-3'-phosphate
  modified_base 17: mod_base = OTHER; note = 2'-O-methyladenosine-3'-phosphate
  modified_base 18: mod_base = OTHER; note = 2'-O-methylguanosine-3'-phosphate
  modified_base 19: mod_base = OTHER; note = 2'-O-methyluridine-3'-phosphate
  modified_base 20: mod_base = OTHER; note = 2'-O-methyluridine-3'-phosphate
  modified_base 21: mod_base = OTHER; note = 2'-O-methyladenosine-3'-phosphate ((2S,4R)-1-[29-[[2-(acetylamino)-2-deoxy-beta-D-galactopyra nosyl]oxy]-14,14-bis[[3-[[3-[[5-[[2-(acetylamino)-2-deoxy-b eta-D-galactopyranosyl]oxy]-1-oxopentyl]amino]propyl]amino] -3-oxopropoxy]methyl]-1,12,19,25-tetraoxo-16-oxa-13,20,24-t riazanonacos-1-yl]-4-hydroxy-2-pyrrolidinyl)methyl ester
acaaagttacatccaaagtta

SEQ ID NO: 217 - RNA, 21 nt, synthetic construct
  source 1..21: mol_type = other RNA
  modified_base 1: mod_base = OTHER; note = 2'-O-methyladenosine-3'-phosphorothioate
  modified_base 2: mod_base = OTHER; note = 2'-O-methyladenosine-3'-phosphorothioate
  modified_base 3: mod_base = OTHER; note = 2'-O-methylguanosine-3'-phosphate
  modified_base 4: mod_base = OTHER; note = 2'-O-methyluridine-3'-phosphate
  modified_base 5: mod_base = OTHER; note = 2'-O-methyluridine-3'-phosphate
  modified_base 6: mod_base = OTHER; note = 2'-O-methyladenosine-3'-phosphate
  modified_base 7: mod_base = OTHER; note = 2'-deoxy-2'-fluorocytidine-3'-phosphate
  modified_base 8: mod_base = OTHER; note = 2'-O-methyladenosine-3'-phosphate
  modified_base 9: mod_base = OTHER; note = 2'-deoxy-2'-fluorouridine-3'-phosphate
  modified_base 10: mod_base = OTHER; note = 2'-deoxy-2'-fluorocytidine-3'-phosphate
  modified_base 11: mod_base = OTHER; note = 2'-deoxy-2'-fluorocytidine-3'-phosphate
  modified_base 12: mod_base = OTHER; note = 2'-O-methyladenosine-3'-phosphate
  modified_base 13: mod_base = OTHER; note = 2'-O-methyladenosine-3'-phosphate
  modified_base 14: mod_base = OTHER; note = 2'-O-methyladenosine-3'-phosphate
  modified_base 15: mod_base = OTHER; note = 2'-O-methylguanosine-3'-phosphate
  modified_base 16: mod_base = OTHER; note = 2'-O-methyluridine-3'-phosphate
  modified_base 17: mod_base = OTHER; note = 2'-O-methyluridine-3'-phosphate
  modified_base 18: mod_base = OTHER; note = 2'-O-methyladenosine-3'-phosphate
  modified_base 19: mod_base = OTHER; note = 2'-O-methyluridine-3'-phosphate
  modified_base 20: mod_base = OTHER; note = 2'-O-methylcytidine-3'-phosphate
  modified_base 21: mod_base = OTHER; note = 2'-O-methyladenosine-3'-phosphate ((2S,4R)-1-[29-[[2-(acetylamino)-2-deoxy-beta-D-galactopyra nosyl]oxy]-14,14-bis[[3-[[3-[[5-[[2-(acetylamino)-2-deoxy-b eta-D-galactopyranosyl]oxy]-1-oxopentyl]amino]propyl]amino] -3-oxopropoxy]methyl]-1,12,19,25-tetraoxo-16-oxa-13,20,24-t riazanonacos-1-yl]-4-hydroxy-2-pyrrolidinyl)methyl ester
aagttacatccaaagttatca

SEQ ID NO: 218 - RNA, 21 nt, synthetic construct
  source 1..21: mol_type = other RNA
  modified_base 1: mod_base = OTHER; note = 2'-O-methyluridine-3'-phosphorothioate
  modified_base 2: mod_base = OTHER; note = 2'-O-methyladenosine-3'-phosphorothioate
  modified_base 3: mod_base = OTHER; note = 2'-O-methylcytidine-3'-phosphate
  modified_base 4: mod_base = OTHER; note = 2'-O-methyladenosine-3'-phosphate
  modified_base 5: mod_base = OTHER; note = 2'-O-methyluridine-3'-phosphate
  modified_base 6: mod_base = OTHER; note = 2'-O-methylcytidine-3'-phosphate
  modified_base 7: mod_base = OTHER; note = 2'-deoxy-2'-fluorocytidine-3'-phosphate
  modified_base 8: mod_base = OTHER; note = 2'-O-methyladenosine-3'-phosphate
  modified_base 9: mod_base = OTHER; note = 2'-deoxy-2'-fluoroadenosine-3'-phosphate
  modified_base 10: mod_base = OTHER; note = 2'-deoxy-2'-fluoroadenosine-3'-phosphate
  modified_base 11: mod_base = OTHER; note = 2'-deoxy-2'-fluoroguanosine-3'-phosphate
  modified_base 12: mod_base = OTHER; note = 2'-O-methyluridine-3'-phosphate
  modified_base 13: mod_base = OTHER; note = 2'-O-methyluridine-3'-phosphate
  modified_base 14: mod_base = OTHER; note = 2'-O-methyladenosine-3'-phosphate
  modified_base 15: mod_base = OTHER; note = 2'-O-methyluridine-3'-phosphate
  modified_base 16: mod_base = OTHER; note = 2'-O-methylcytidine-3'-phosphate
  modified_base 17: mod_base = OTHER; note = 2'-O-methylguanosine-3'-phosphate
  modified_base 18: mod_base = OTHER; note = 2'-O-methyladenosine-3'-phosphate
  modified_base 19: mod_base = OTHER; note = 2'-O-methyladenosine-3'-phosphate
  modified_base 20: mod_base = OTHER; note = 2'-O-methyladenosine-3'-phosphate
  modified_base 21: mod_base = OTHER; note = 2'-O-methyladenosine-3'-phosphate ((2S,4R)-1-[29-[[2-(acetylamino)-2-deoxy-beta-D-galactopyra nosyl]oxy]-14,14-bis[[3-[[3-[[5-[[2-(acetylamino)-2-deoxy-b eta-D-galactopyranosyl]oxy]-1-oxopentyl]amino]propyl]amino] -3-oxopropoxy]methyl]-1,12,19,25-tetraoxo-16-oxa-13,20,24-t riazanonacos-1-yl]-4-hydroxy-2-pyrrolidinyl)methyl ester
tacatccaaagttatcgaaaa

SEQ ID NO: 219 - RNA, 21 nt, synthetic construct
  source 1..21: mol_type = other RNA
  modified_base 1: mod_base = OTHER; note = 2'-O-methyluridine-3'-phosphorothioate
  modified_base 2: mod_base = OTHER; note = 2'-O-methylcytidine-3'-phosphorothioate
  modified_base 3: mod_base = OTHER; note = 2'-O-methylcytidine-3'-phosphate
  modified_base 4: mod_base = OTHER; note = 2'-O-methyladenosine-3'-phosphate
  modified_base 5: mod_base = OTHER; note = 2'-O-methyladenosine-3'-phosphate
  modified_base 6: mod_base = OTHER; note = 2'-O-methyladenosine-3'-phosphate
  modified_base 7: mod_base = OTHER; note = 2'-deoxy-2'-fluoroguanosine-3'-phosphate
  modified_base 8: mod_base = OTHER; note = 2'-O-methyluridine-3'-phosphate
  modified_base 9: mod_base = OTHER; note = 2'-deoxy-2'-fluorouridine-3'-phosphate
  modified_base 10: mod_base = OTHER; note = 2'-deoxy-2'-fluoroadenosine-3'-phosphate
  modified_base 11: mod_base = OTHER; note = 2'-deoxy-2'-fluorouridine-3'-phosphate
  modified_base 12: mod_base = OTHER; note = 2'-O-methylcytidine-3'-phosphate
  modified_base 13: mod_base = OTHER; note = 2'-O-methylguanosine-3'-phosphate
  modified_base 14: mod_base = OTHER; note = 2'-O-methyladenosine-3'-phosphate
  modified_base 15: mod_base = OTHER; note = 2'-O-methyladenosine-3'-phosphate
  modified_base 16: mod_base = OTHER; note = 2'-O-methyladenosine-3'-phosphate
  modified_base 17: mod_base = OTHER; note = 2'-O-methyladenosine-3'-phosphate
  modified_base 18: mod_base = OTHER; note = 2'-O-methylguanosine-3'-phosphate
  modified_base 19: mod_base = OTHER; note = 2'-O-methyluridine-3'-phosphate
  modified_base 20: mod_base = OTHER; note = 2'-O-methyluridine-3'-phosphate
  modified_base 21: mod_base = OTHER; note = 2'-O-methyladenosine-3'-phosphate ((2S,4R)-1-[29-[[2-(acetylamino)-2-deoxy-beta-D-galactopyra nosyl]oxy]-14,14-bis[[3-[[3-[[5-[[2-(acetylamino)-2-deoxy-b eta-D-galactopyranosyl]oxy]-1-oxopentyl]amino]propyl]amino] -3-oxopropoxy]methyl]-1,12,19,25-tetraoxo-16-oxa-13,20,24-t riazanonacos-1-yl]-4-hydroxy-2-pyrrolidinyl)methyl ester
tccaaagttatcgaaaagtta

SEQ ID NO: 220 - RNA, 21 nt, synthetic construct
  source 1..21: mol_type = other RNA
  modified_base 1: mod_base = OTHER; note = 2'-O-methylguanosine-3'-phosphorothioate
  modified_base 2: mod_base = OTHER; note = 2'-O-methyladenosine-3'-phosphorothioate
  modified_base 3: mod_base = OTHER; note = 2'-O-methylguanosine-3'-phosphate
  modified_base 4: mod_base = OTHER; note = 2'-O-methyladenosine-3'-phosphate
  modified_base 5: mod_base = OTHER; note = 2'-O-methylcytidine-3'-phosphate
  modified_base 6: mod_base = OTHER; note = 2'-O-methyladenosine-3'-phosphate
  modified_base 7: mod_base = OTHER; note = 2'-deoxy-2'-fluoroadenosine-3'-phosphate
  modified_base 8: mod_base = OTHER; note = 2'-O-methyluridine-3'-phosphate
  modified_base 9: mod_base = OTHER; note = 2'-deoxy-2'-fluoroguanosine-3'-phosphate
  modified_base 10: mod_base = OTHER; note = 2'-deoxy-2'-fluoroadenosine-3'-phosphate
  modified_base 11: mod_base = OTHER; note = 2'-deoxy-2'-fluoroguanosine-3'-phosphate
  modified_base 12: mod_base = OTHER; note = 2'-O-methylcytidine-3'-phosphate
  modified_base 13: mod_base = OTHER; note = 2'-O-methyluridine-3'-phosphate
  modified_base 14: mod_base = OTHER; note = 2'-O-methyladenosine-3'-phosphate
  modified_base 15: mod_base = OTHER; note = 2'-O-methylcytidine-3'-phosphate
  modified_base 16: mod_base = OTHER; note = 2'-O-methyluridine-3'-phosphate
  modified_base 17: mod_base = OTHER; note = 2'-O-methyladenosine-3'-phosphate
  modified_base 18: mod_base = OTHER; note = 2'-O-methyladenosine-3'-phosphate
  modified_base 19: mod_base = OTHER; note = 2'-O-methyluridine-3'-phosphate
  modified_base 20: mod_base = OTHER; note = 2'-O-methyluridine-3'-phosphate
  modified_base 21: mod_base = OTHER; note = 2'-O-methyladenosine-3'-phosphate ((2S,4R)-1-[29-[[2-(acetylamino)-2-deoxy-beta-D-galactopyra nosyl]oxy]-14,14-bis[[3-[[3-[[5-[[2-(acetylamino)-2-deoxy-b eta-D-galactopyranosyl]oxy]-1-oxopentyl]amino]propyl]amino] -3-oxopropoxy]methyl]-1,12,19,25-tetraoxo-16-oxa-13,20,24-t riazanonacos-1-yl]-4-hydroxy-2-pyrrolidinyl)methyl ester
gagacaatgagctactaatta

SEQ ID NO: 221 - RNA, 21 nt, synthetic construct
  source 1..21: mol_type = other RNA
  modified_base 1: mod_base = OTHER; note = 2'-O-methyladenosine-3'-phosphorothioate
  modified_base 2: mod_base = OTHER; note = 2'-O-methylguanosine-3'-phosphorothioate
  modified_base 3: mod_base = OTHER; note = 2'-O-methyladenosine-3'-phosphate
  modified_base 4: mod_base = OTHER; note = 2'-O-methylcytidine-3'-phosphate
  modified_base 5: mod_base = OTHER; note = 2'-O-methyladenosine-3'-phosphate
  modified_base 6: mod_base = OTHER; note = 2'-O-methyladenosine-3'-phosphate
  modified_base 7: mod_base = OTHER; note = 2'-deoxy-2'-fluorouridine-3'-phosphate
  modified_base 8: mod_base = OTHER; note = 2'-O-methylguanosine-3'-phosphate
  modified_base 9: mod_base = OTHER; note = 2'-deoxy-2'-fluoroadenosine-3'-phosphate
  modified_base 10: mod_base = OTHER; note = 2'-deoxy-2'-fluoroguanosine-3'-phosphate
  modified_base 11: mod_base = OTHER; note = 2'-deoxy-2'-fluorocytidine-3'-phosphate
  modified_base 12: mod_base = OTHER; note = 2'-O-methyluridine-3'-phosphate
  modified_base 13: mod_base = OTHER; note = 2'-O-methyladenosine-3'-phosphate
  modified_base 14: mod_base = OTHER; note = 2'-O-methylcytidine-3'-phosphate
  modified_base 15: mod_base = OTHER; note = 2'-O-methyluridine-3'-phosphate
  modified_base 16: mod_base = OTHER; note = 2'-O-methyladenosine-3'-phosphate
  modified_base 17: mod_base = OTHER; note = 2'-O-methyladenosine-3'-phosphate
  modified_base 18: mod_base = OTHER; note = 2'-O-methyluridine-3'-phosphate
  modified_base 19: mod_base = OTHER; note = 2'-O-methyluridine-3'-phosphate
  modified_base 20: mod_base = OTHER; note = 2'-O-methyluridine-3'-phosphate
  modified_base 21: mod_base = OTHER; note = 2'-O-methyladenosine-3'-phosphate ((2S,4R)-1-[29-[[2-(acetylamino)-2-deoxy-beta-D-galactopyra nosyl]oxy]-14,14-bis[[3-[[3-[[5-[[2-(acetylamino)-2-deoxy-b eta-D-galactopyranosyl]oxy]-1-oxopentyl]amino]propyl]amino] -3-oxopropoxy]methyl]-1,12,19,25-tetraoxo-16-oxa-13,20,24-t riazanonacos-1-yl]-4-hydroxy-2-pyrrolidinyl)methyl ester
agacaatgagctactaattta

SEQ ID NO: 222 - RNA, 21 nt, synthetic construct
  source 1..21: mol_type = other RNA
  modified_base 1: mod_base = OTHER; note = 2'-O-methyladenosine-3'-phosphorothioate
  modified_base 2: mod_base = OTHER; note = 2'-O-methyladenosine-3'-phosphorothioate
  modified_base 3: mod_base = OTHER; note = 2'-O-methyluridine-3'-phosphate
  modified_base 4: mod_base = OTHER; note = 2'-O-methylguanosine-3'-phosphate
  modified_base 5: mod_base = OTHER; note = 2'-O-methyladenosine-3'-phosphate
  modified_base 6: mod_base = OTHER; note = 2'-O-methylguanosine-3'-phosphate
  modified_base 7: mod_base = OTHER; note = 2'-deoxy-2'-fluorocytidine-3'-phosphate
  modified_base 8: mod_base = OTHER; note = 2'-O-methyluridine-3'-phosphate
  modified_base 9: mod_base = OTHER; note = 2'-deoxy-2'-fluoroadenosine-3'-phosphate
  modified_base 10: mod_base = OTHER; note = 2'-deoxy-2'-fluorocytidine-3'-phosphate
  modified_base 11: mod_base = OTHER; note = 2'-deoxy-2'-fluorouridine-3'-phosphate
  modified_base 12: mod_base = OTHER; note = 2'-O-methyladenosine-3'-phosphate
  modified_base 13: mod_base = OTHER; note = 2'-O-methyladenosine-3'-phosphate
  modified_base 14: mod_base = OTHER; note = 2'-O-methyluridine-3'-phosphate
  modified_base 15: mod_base = OTHER; note = 2'-O-methyluridine-3'-phosphate
  modified_base 16: mod_base = OTHER; note = 2'-O-methyluridine-3'-phosphate
  modified_base 17: mod_base = OTHER; note = 2'-O-methyladenosine-3'-phosphate
  modified_base 18: mod_base = OTHER; note = 2'-O-methyluridine-3'-phosphate
  modified_base 19: mod_base = OTHER; note = 2'-O-methyladenosine-3'-phosphate
  modified_base 20: mod_base = OTHER; note = 2'-O-methyladenosine-3'-phosphate
  modified_base 21: mod_base = OTHER; note = 2'-O-methyladenosine-3'-phosphate ((2S,4R)-1-[29-[[2-(acetylamino)-2-deoxy-beta-D-galactopyra nosyl]oxy]-14,14-bis[[3-[[3-[[5-[[2-(acetylamino)-2-deoxy-b eta-D-galactopyranosyl]oxy]-1-oxopentyl]amino]propyl]amino] -3-oxopropoxy]methyl]-1,12,19,25-tetraoxo-16-oxa-13,20,24-t riazanonacos-1-yl]-4-hydroxy-2-pyrrolidinyl)methyl ester
aatgagctactaatttataaa

SEQ ID NO: 223 - RNA, 21 nt, synthetic construct
  source 1..21: mol_type = other RNA
  modified_base 1: mod_base = OTHER; note = 2'-O-methylguanosine-3'-phosphorothioate
  modified_base 2: mod_base = OTHER; note = 2'-O-methyladenosine-3'-phosphorothioate
  modified_base 3: mod_base = OTHER; note = 2'-O-methylguanosine-3'-phosphate
  modified_base 4: mod_base = OTHER; note = 2'-O-methylcytidine-3'-phosphate
  modified_base 5: mod_base = OTHER; note = 2'-O-methyluridine-3'-phosphate
  modified_base 6: mod_base = OTHER; note = 2'-O-methyladenosine-3'-phosphate
  modified_base 7: mod_base = OTHER; note = 2'-deoxy-2'-fluorocytidine-3'-phosphate
  modified_base 8: mod_base = OTHER; note = 2'-O-methyluridine-3'-phosphate
  modified_base 9: mod_base = OTHER; note = 2'-deoxy-2'-fluoroadenosine-3'-phosphate
  modified_base 10: mod_base = OTHER; note = 2'-deoxy-2'-fluoroadenosine-3'-phosphate
  modified_base 11: mod_base = OTHER; note = 2'-deoxy-2'-fluorouridine-3'-phosphate
  modified_base 12: mod_base = OTHER; note = 2'-O-methyluridine-3'-phosphate
  modified_base 13: mod_base = OTHER; note = 2'-O-methyluridine-3'-phosphate
  modified_base 14: mod_base = OTHER; note = 2'-O-methyladenosine-3'-phosphate
  modified_base 15: mod_base = OTHER; note = 2'-O-methyluridine-3'-phosphate
  modified_base 16: mod_base = OTHER; note = 2'-O-methyladenosine-3'-phosphate
  modified_base 17: mod_base = OTHER; note = 2'-O-methyladenosine-3'-phosphate
  modified_base 18: mod_base = OTHER; note = 2'-O-methyladenosine-3'-phosphate
  modified_base 19: mod_base = OTHER; note = 2'-O-methylguanosine-3'-phosphate
  modified_base 20: mod_base = OTHER; note = 2'-O-methyladenosine-3'-phosphate
  modified_base 21: mod_base = OTHER; note = 2'-O-methyladenosine-3'-phosphate ((2S,4R)-1-[29-[[2-(acetylamino)-2-deoxy-beta-D-galactopyra nosyl]oxy]-14,14-bis[[3-[[3-[[5-[[2-(acetylamino)-2-deoxy-b eta-D-galactopyranosyl]oxy]-1-oxopentyl]amino]propyl]amino] -3-oxopropoxy]methyl]-1,12,19,25-tetraoxo-16-oxa-13,20,24-t riazanonacos-1-yl]-4-hydroxy-2-pyrrolidinyl)methyl ester
gagctactaatttataaagaa

SEQ ID NO: 224 - RNA, 21 nt, synthetic construct
  source 1..21: mol_type = other RNA
  modified_base 1: mod_base = OTHER; note = 2'-O-methylcytidine-3'-phosphorothioate
  modified_base 2: mod_base = OTHER; note = 2'-O-methyluridine-3'-phosphorothioate
  modified_base 3: mod_base = OTHER; note = 2'-O-methylcytidine-3'-phosphate
  modified_base 4: mod_base = OTHER; note = 2'-O-methyladenosine-3'-phosphate
  modified_base 5: mod_base = OTHER; note = 2'-O-methyluridine-3'-phosphate
  modified_base 6: mod_base = OTHER; note = 2'-O-methylcytidine-3'-phosphate
  modified_base 7: mod_base = OTHER; note = 2'-deoxy-2'-fluoroadenosine-3'-phosphate
  modified_base 8: mod_base = OTHER; note = 2'-O-methylguanosine-3'-phosphate
  modified_base 9: mod_base = OTHER; note = 2'-deoxy-2'-fluoroguanosine-3'-phosphate
  modified_base 10: mod_base = OTHER; note = 2'-deoxy-2'-fluorouridine-3'-phosphate
  modified_base 11: mod_base = OTHER; note = 2'-deoxy-2'-fluoroadenosine-3'-phosphate
  modified_base 12: mod_base = OTHER; note = 2'-O-methyluridine-3'-phosphate
  modified_base 13: mod_base = OTHER; note = 2'-O-methyluridine-3'-phosphate
  modified_base 14: mod_base = OTHER; note = 2'-O-methylguanosine-3'-phosphate
  modified_base 15: mod_base = OTHER; note = 2'-O-methylcytidine-3'-phosphate
  modified_base 16: mod_base = OTHER; note = 2'-O-methyluridine-3'-phosphate
  modified_base 17: mod_base = OTHER; note = 2'-O-methylguanosine-3'-phosphate
  modified_base 18: mod_base = OTHER; note = 2'-O-methyladenosine-3'-phosphate
  modified_base 19: mod_base = OTHER; note = 2'-O-methyladenosine-3'-phosphate
  modified_base 20: mod_base = OTHER; note = 2'-O-methyluridine-3'-phosphate
  modified_base 21: mod_base = OTHER; note = 2'-O-methyladenosine-3'-phosphate ((2S,4R)-1-[29-[[2-(acetylamino)-2-deoxy-beta-D-galactopyra nosyl]oxy]-14,14-bis[[3-[[3-[[5-[[2-(acetylamino)-2-deoxy-b eta-D-galactopyranosyl]oxy]-1-oxopentyl]amino]propyl]amino] -3-oxopropoxy]methyl]-1,12,19,25-tetraoxo-16-oxa-13,20,24-t riazanonacos-1-yl]-4-hydroxy-2-pyrrolidinyl)methyl ester
ctcatcaggtattgctgaata

SEQ ID NO: 225 - RNA, 21 nt, synthetic construct
  source 1..21: mol_type = other RNA
  modified_base 1: mod_base = OTHER; note = 2'-O-methyluridine-3'-phosphorothioate
  modified_base 2: mod_base = OTHER; note = 2'-O-methylcytidine-3'-phosphorothioate
  modified_base 3: mod_base = OTHER; note = 2'-O-methyladenosine-3'-phosphate
  modified_base 4: mod_base = OTHER; note = 2'-O-methylguanosine-3'-phosphate
  modified_base 5: mod_base = OTHER; note = 2'-O-methylguanosine-3'-phosphate
  modified_base 6: mod_base = OTHER; note = 2'-O-methyluridine-3'-phosphate
  modified_base 7: mod_base = OTHER; note = 2'-deoxy-2'-fluoroadenosine-3'-phosphate
  modified_base 8: mod_base = OTHER; note = 2'-O-methyluridine-3'-phosphate
  modified_base 9: mod_base = OTHER; note = 2'-deoxy-2'-fluorouridine-3'-phosphate
  modified_base 10: mod_base = OTHER; note = 2'-deoxy-2'-fluoroguanosine-3'-phosphate
  modified_base 11: mod_base = OTHER; note = 2'-deoxy-2'-fluorocytidine-3'-phosphate
  modified_base 12: mod_base = OTHER; note = 2'-O-methyluridine-3'-phosphate
  modified_base 13: mod_base = OTHER; note = 2'-O-methylguanosine-3'-phosphate
  modified_base 14: mod_base = OTHER; note = 2'-O-methyladenosine-3'-phosphate
  modified_base 15: mod_base = OTHER; note = 2'-O-methyladenosine-3'-phosphate
  modified_base 16: mod_base = OTHER; note = 2'-O-methyluridine-3'-phosphate
  modified_base 17: mod_base = OTHER; note = 2'-O-methyluridine-3'-phosphate
  modified_base 18: mod_base = OTHER; note = 2'-O-methyluridine-3'-phosphate
  modified_base 19: mod_base = OTHER; note = 2'-O-methyluridine-3'-phosphate
  modified_base 20: mod_base = OTHER; note = 2'-O-methylguanosine-3'-phosphate
  modified_base 21: mod_base = OTHER; note = 2'-O-methyladenosine-3'-phosphate ((2S,4R)-1-[29-[[2-(acetylamino)-2-deoxy-beta-D-galactopyra nosyl]oxy]-14,14-bis[[3-[[3-[[5-[[2-(acetylamino)-2-deoxy-b eta-D-galactopyranosyl]oxy]-1-oxopentyl]amino]propyl]amino] -3-oxopropoxy]methyl]-1,12,19,25-tetraoxo-16-oxa-13,20,24-t riazanonacos-1-yl]-4-hydroxy-2-pyrrolidinyl)methyl ester
tcaggtattgctgaattttga

SEQ ID NO: 226 - RNA, 21 nt, synthetic construct
  source 1..21: mol_type = other RNA
  modified_base 1: mod_base = OTHER; note = 2'-O-methylguanosine-3'-phosphorothioate
  modified_base 2: mod_base = OTHER; note = 2'-O-methyluridine-3'-phosphorothioate
  modified_base 3: mod_base = OTHER; note = 2'-O-methyladenosine-3'-phosphate
  modified_base 4: mod_base = OTHER; note = 2'-O-methyluridine-3'-phosphate
  modified_base 5: mod_base = OTHER; note = 2'-O-methyluridine-3'-phosphate
  modified_base 6: mod_base = OTHER; note = 2'-O-methylguanosine-3'-phosphate
  modified_base 7: mod_base = OTHER; note = 2'-deoxy-2'-fluorocytidine-3'-phosphate
  modified_base 8: mod_base = OTHER; note = 2'-O-methyluridine-3'-phosphate
  modified_base 9: mod_base = OTHER; note = 2'-deoxy-2'-fluoroguanosine-3'-phosphate
  modified_base 10: mod_base = OTHER; note = 2'-deoxy-2'-fluoroadenosine-3'-phosphate
  modified_base 11: mod_base = OTHER; note = 2'-deoxy-2'-fluoroadenosine-3'-phosphate
  modified_base 12: mod_base = OTHER; note = 2'-O-methyluridine-3'-phosphate
  modified_base 13: mod_base = OTHER; note = 2'-O-methyluridine-3'-phosphate
  modified_base 14: mod_base = OTHER; note = 2'-O-methyluridine-3'-phosphate
  modified_base 15: mod_base = OTHER; note = 2'-O-methyluridine-3'-phosphate
  modified_base 16: mod_base = OTHER; note = 2'-O-methylguanosine-3'-phosphate
  modified_base 17: mod_base = OTHER; note = 2'-O-methylguanosine-3'-phosphate
  modified_base 18: mod_base = OTHER; note = 2'-O-methyladenosine-3'-phosphate
  modified_base 19: mod_base = OTHER; note = 2'-O-methyluridine-3'-phosphate
  modified_base 20: mod_base = OTHER; note = 2'-O-methylcytidine-3'-phosphate
  modified_base 21: mod_base = OTHER; note = 2'-O-methyladenosine-3'-phosphate ((2S,4R)-1-[29-[[2-(acetylamino)-2-deoxy-beta-D-galactopyra nosyl]oxy]-14,14-bis[[3-[[3-[[5-[[2-(acetylamino)-2-deoxy-b eta-D-galactopyranosyl]oxy]-1-oxopentyl]amino]propyl]amino] -3-oxopropoxy]methyl]-1,12,19,25-tetraoxo-16-oxa-13,20,24-t riazanonacos-1-yl]-4-hydroxy-2-pyrrolidinyl)methyl ester
gtattgctgaattttggatca

SEQ ID NO: 227 - RNA, 21 nt, synthetic construct
  source 1..21: mol_type = other RNA
  modified_base 1: mod_base = OTHER; note = 2'-O-methylguanosine-3'-phosphorothioate
  modified_base 2: mod_base = OTHER; note = 2'-O-methyladenosine-3'-phosphorothioate
  modified_base 3: mod_base = OTHER; note = 2'-O-methyladenosine-3'-phosphate
  modified_base 4: mod_base = OTHER; note = 2'-O-methylguanosine-3'-phosphate
  modified_base 5: mod_base = OTHER; note = 2'-O-methylcytidine-3'-phosphate
  modified_base 6: mod_base = OTHER; note = 2'-O-methyluridine-3'-phosphate
  modified_base 7: mod_base = OTHER; note = 2'-deoxy-2'-fluorocytidine-3'-phosphate
  modified_base 8: mod_base = OTHER; note = 2'-O-methyladenosine-3'-phosphate
  modified_base 9: mod_base = OTHER; note = 2'-deoxy-2'-fluoroguanosine-3'-phosphate
  modified_base 10: mod_base = OTHER; note = 2'-deoxy-2'-fluorocytidine-3'-phosphate
  modified_base 11: mod_base = OTHER; note = 2'-deoxy-2'-fluorocytidine-3'-phosphate
  modified_base 12: mod_base = OTHER; note = 2'-O-methylcytidine-3'-phosphate
  modified_base 13: mod_base = OTHER; note = 2'-O-methyladenosine-3'-phosphate
  modified_base 14: mod_base = OTHER; note = 2'-O-methyladenosine-3'-phosphate
  modified_base 15: mod_base = OTHER; note = 2'-O-methylguanosine-3'-phosphate
  modified_base 16: mod_base = OTHER; note = 2'-O-methyladenosine-3'-phosphate
  modified_base 17: mod_base = OTHER; note = 2'-O-methyluridine-3'-phosphate
  modified_base 18: mod_base = OTHER; note = 2'-O-methyluridine-3'-phosphate
  modified_base 19: mod_base = OTHER; note = 2'-O-methylguanosine-3'-phosphate
  modified_base 20: mod_base = OTHER; note = 2'-O-methyluridine-3'-phosphate
  modified_base 21: mod_base = OTHER; note = 2'-O-methyladenosine-3'-phosphate ((2S,4R)-1-[29-[[2-(acetylamino)-2-deoxy-beta-D-galactopyra nosyl]oxy]-14,14-bis[[3-[[3-[[5-[[2-(acetylamino)-2-deoxy-b eta-D-galactopyranosyl]oxy]-1-oxopentyl]amino]propyl]amino] -3-oxopropoxy]methyl]-1,12,19,25-tetraoxo-16-oxa-13,20,24-t riazanonacos-1-yl]-4-hydroxy-2-pyrrolidinyl)methyl ester
gaagctcagcccaagattgta

SEQ ID NO: 228 - RNA, 21 nt, synthetic construct
  source 1..21: mol_type = other RNA
  modified_base 1: mod_base = OTHER; note = 2'-O-methylguanosine-3'-phosphorothioate
  modified_base 2: mod_base = OTHER; note = 2'-O-methylcytidine-3'-phosphorothioate
  modified_base 3: mod_base = OTHER; note = 2'-O-methyladenosine-3'-phosphate
  modified_base 4: mod_base = OTHER; note = 2'-O-methyluridine-3'-phosphate
  modified_base 5: mod_base = OTHER; note = 2'-O-methyluridine-3'-phosphate
  modified_base 6: mod_base = OTHER; note = 2'-O-methylguanosine-3'-phosphate
  modified_base 7: mod_base = OTHER; note = 2'-deoxy-2'-fluorouridine-3'-phosphate
  modified_base 8: mod_base = OTHER; note = 2'-O-methyluridine-3'-phosphate
  modified_base 9: mod_base = OTHER; note = 2'-deoxy-2'-fluoroguanosine-3'-phosphate
  modified_base 10: mod_base = OTHER; note = 2'-deoxy-2'-fluoroadenosine-3'-phosphate
  modified_base 11: mod_base = OTHER; note = 2'-deoxy-2'-fluoroadenosine-3'-phosphate
  modified_base 12: mod_base = OTHER; note = 2'-O-methyluridine-3'-phosphate
  modified_base 13: mod_base = OTHER; note = 2'-O-methyluridine-3'-phosphate
  modified_base 14: mod_base = OTHER; note = 2'-O-methyluridine-3'-phosphate
  modified_base 15: mod_base = OTHER; note = 2'-O-methyluridine-3'-phosphate
  modified_base 16: mod_base = OTHER; note = 2'-O-methylguanosine-3'-phosphate
  modified_base 17: mod_base = OTHER; note = 2'-O-methylguanosine-3'-phosphate
  modified_base 18: mod_base = OTHER; note = 2'-O-methylguanosine-3'-phosphate
  modified_base 19: mod_base = OTHER; note = 2'-O-methyluridine-3'-phosphate
  modified_base 20: mod_base = OTHER; note = 2'-O-methylcytidine-3'-phosphate
  modified_base 21: mod_base = OTHER; note = 2'-O-methyladenosine-3'-phosphate ((2S,4R)-1-[29-[[2-(acetylamino)-2-deoxy-beta-D-galactopyra nosyl]oxy]-14,14-bis[[3-[[3-[[5-[[2-(acetylamino)-2-deoxy-b eta-D-galactopyranosyl]oxy]-1-oxopentyl]amino]propyl]amino] -3-oxopropoxy]methyl]-1,12,19,25-tetraoxo-16-oxa-13,20,24-t riazanonacos-1-yl]-4-hydroxy-2-pyrrolidinyl)methyl ester
gcattgttgaattttgggtca

SEQ ID NO: 229 - RNA, 21 nt, synthetic construct
  source 1..21: mol_type = other RNA
  modified_base 1: mod_base = OTHER; note = 2'-O-methyluridine-3'-phosphorothioate
  modified_base 2: mod_base = OTHER; note = 2'-O-methyluridine-3'-phosphorothioate
  modified_base 3: mod_base = OTHER; note = 2'-O-methylguanosine-3'-phosphate
  modified_base 4: mod_base = OTHER; note = 2'-O-methyluridine-3'-phosphate
  modified_base 5: mod_base = OTHER; note = 2'-O-methyluridine-3'-phosphate
  modified_base 6: mod_base = OTHER; note = 2'-O-methylguanosine-3'-phosphate
  modified_base 7: mod_base = OTHER; note = 2'-deoxy-2'-fluoroadenosine-3'-phosphate
  modified_base 8: mod_base = OTHER; note = 2'-O-methyladenosine-3'-phosphate
  modified_base 9: mod_base = OTHER; note = 2'-deoxy-2'-fluorouridine-3'-phosphate
  modified_base 10: mod_base = OTHER; note = 2'-deoxy-2'-fluorouridine-3'-phosphate
  modified_base 11: mod_base = OTHER; note = 2'-deoxy-2'-fluorouridine-3'-phosphate
  modified_base 12: mod_base = OTHER; note = 2'-O-methyluridine-3'-phosphate
  modified_base 13: mod_base = OTHER; note = 2'-O-methylguanosine-3'-phosphate
  modified_base 14: mod_base = OTHER; note = 2'-O-methylguanosine-3'-phosphate
  modified_base 15: mod_base = OTHER; note = 2'-O-methylguanosine-3'-phosphate
  modified_base 16: mod_base = OTHER; note = 2'-O-methyluridine-3'-phosphate
  modified_base 17: mod_base = OTHER; note = 2'-O-methylcytidine-3'-phosphate
  modified_base 18: mod_base = OTHER; note = 2'-O-methyladenosine-3'-phosphate
  modified_base 19: mod_base = OTHER; note = 2'-O-methyladenosine-3'-phosphate
  modified_base 20: mod_base = OTHER; note = 2'-O-methyluridine-3'-phosphate
  modified_base 21: mod_base = OTHER; note = 2'-O-methyladenosine-3'-phosphate ((2S,4R)-1-[29-[[2-(acetylamino)-2-deoxy-beta-D-galactopyra nosyl]oxy]-14,14-bis[[3-[[3-[[5-[[2-(acetylamino)-2-deoxy-b eta-D-galactopyranosyl]oxy]-1-oxopentyl]amino]propyl]amino] -3-oxopropoxy]methyl]-1,12,19,25-tetraoxo-16-oxa-13,20,24-t riazanonacos-1-yl]-4-hydroxy-2-pyrrolidinyl)methyl ester
ttgttgaattttgggtcaata

SEQ ID NO: 230 - RNA, 21 nt, synthetic construct
  source 1..21: mol_type = other RNA
  modified_base 1: mod_base = OTHER; note = 2'-O-methyladenosine-3'-phosphorothioate
  modified_base 2: mod_base = OTHER; note = 2'-O-methyluridine-3'-phosphorothioate
  modified_base 3: mod_base = OTHER; note = 2'-O-methyluridine-3'-phosphate
  modified_base 4: mod_base = OTHER; note = 2'-O-methylcytidine-3'-phosphate
  modified_base 5: mod_base = OTHER; note = 2'-O-methylcytidine-3'-phosphate
  modified_base 6: mod_base = OTHER; note = 2'-O-methyluridine-3'-phosphate
  modified_base 7: mod_base = OTHER; note = 2'-deoxy-2'-fluoroadenosine-3'-phosphate
  modified_base 8: mod_base = OTHER; note = 2'-O-methyluridine-3'-phosphate
  modified_base 9: mod_base = OTHER; note = 2'-deoxy-2'-fluoroguanosine-3'-phosphate
  modified_base 10: mod_base = OTHER; note = 2'-deoxy-2'-fluoroguanosine-3'-phosphate
  modified_base 11: mod_base = OTHER; note = 2'-deoxy-2'-fluoroguanosine-3'-phosphate
  modified_base 12: mod_base = OTHER; note = 2'-O-methylguanosine-3'-phosphate
  modified_base 13: mod_base = OTHER; note = 2'-O-methylguanosine-3'-phosphate
  modified_base 14: mod_base = OTHER; note = 2'-O-methylcytidine-3'-phosphate
  modified_base 15: mod_base = OTHER; note = 2'-O-methyladenosine-3'-phosphate
  modified_base 16: mod_base = OTHER; note = 2'-O-methyladenosine-3'-phosphate
  modified_base 17: mod_base = OTHER; note = 2'-O-methylguanosine-3'-phosphate
  modified_base 18: mod_base = OTHER; note = 2'-O-methyluridine-3'-phosphate
  modified_base 19: mod_base = OTHER; note = 2'-O-methyluridine-3'-phosphate
  modified_base 20: mod_base = OTHER; note = 2'-O-methyluridine-3'-phosphate
  modified_base 21: mod_base = OTHER; note = 2'-O-methyladenosine-3'-phosphate ((2S,4R)-1-[29-[[2-(acetylamino)-2-deoxy-beta-D-galactopyra nosyl]oxy]-14,14-bis[[3-[[3-[[5-[[2-(acetylamino)-2-deoxy-b eta-D-galactopyranosyl]oxy]-1-oxopentyl]amino]propyl]amino] -3-oxopropoxy]methyl]-1,12,19,25-tetraoxo-16-oxa-13,20,24-t riazanonacos-1-yl]-4-hydroxy-2-pyrrolidinyl)methyl ester
attcctatgggggcaagttta

SEQ ID NO: 231 - RNA, 21 nt, synthetic construct
  source 1..21: mol_type = other RNA
  modified_base 1: mod_base = OTHER; note = 2'-O-methyladenosine-3'-phosphorothioate
  modified_base 2: mod_base = OTHER; note = 2'-O-methyladenosine-3'-phosphorothioate
  modified_base 3: mod_base = OTHER; note = 2'-O-methyladenosine-3'-phosphate
  modified_base 4: mod_base = OTHER; note = 2'-O-methyladenosine-3'-phosphate
  modified_base 5: mod_base = OTHER; note = 2'-O-methyluridine-3'-phosphate
  modified_base 6: mod_base = OTHER; note = 2'-O-methyladenosine-3'-phosphate
  modified_base 7: mod_base = OTHER; note = 2'-deoxy-2'-fluorouridine-3'-phosphate
  modified_base 8: mod_base = OTHER; note = 2'-O-methylcytidine-3'-phosphate
  modified_base 9: mod_base = OTHER; note = 2'-deoxy-2'-fluorocytidine-3'-phosphate
  modified_base 10: mod_base = OTHER; note = 2'-deoxy-2'-fluorouridine-3'-phosphate
  modified_base 11: mod_base = OTHER; note = 2'-deoxy-2'-fluoroguanosine-3'-phosphate
  modified_base 12: mod_base = OTHER; note = 2'-O-methyluridine-3'-phosphate
  modified_base 13: mod_base = OTHER; note = 2'-O-methylcytidine-3'-phosphate
  modified_base 14: mod_base = OTHER; note = 2'-O-methyluridine-3'-phosphate
  modified_base 15: mod_base = OTHER; note = 2'-O-methylguanosine-3'-phosphate
  modified_base 16: mod_base = OTHER; note = 2'-O-methylcytidine-3'-phosphate
  modified_base 17: mod_base = OTHER; note = 2'-O-methylcytidine-3'-phosphate
  modified_base 18: mod_base = OTHER; note = 2'-O-methyluridine-3'-phosphate
  modified_base 19: mod_base = OTHER; note = 2'-O-methyladenosine-3'-phosphate
  modified_base 20: mod_base = OTHER; note = 2'-O-methyluridine-3'-phosphate
  modified_base 21: mod_base = OTHER; note = 2'-O-methyladenosine-3'-phosphate ((2S,4R)-1-[29-[[2-(acetylamino)-2-deoxy-beta-D-galactopyra nosyl]oxy]-14,14-bis[[3-[[3-[[5-[[2-(acetylamino)-2-deoxy-b eta-D-galactopyranosyl]oxy]-1-oxopentyl]amino]propyl]amino] -3-oxopropoxy]methyl]-1,12,19,25-tetraoxo-16-oxa-13,20,24-t riazanonacos-1-yl]-4-hydroxy-2-pyrrolidinyl)methyl ester
aaaatatcctgtctgcctata

SEQ ID NO: 232 - RNA, 21 nt, synthetic construct
  source 1..21: mol_type = other RNA
  modified_base 1: mod_base = OTHER; note = 2'-O-methyladenosine-3'-phosphorothioate
  modified_base 2: mod_base = OTHER; note = 2'-O-methyladenosine-3'-phosphorothioate
  modified_base 3: mod_base = OTHER; note = 2'-O-methyladenosine-3'-phosphate
  modified_base 4: mod_base = OTHER; note = 2'-O-methyluridine-3'-phosphate
  modified_base 5: mod_base = OTHER; note = 2'-O-methyladenosine-3'-phosphate
  modified_base 6: mod_base = OTHER; note = 2'-O-methyluridine-3'-phosphate
  modified_base 7: mod_base = OTHER; note = 2'-deoxy-2'-fluorocytidine-3'-phosphate
  modified_base 8: mod_base = OTHER; note = 2'-O-methylcytidine-3'-phosphate
  modified_base 9: mod_base = OTHER; note = 2'-deoxy-2'-fluorouridine-3'-phosphate
  modified_base 10: mod_base = OTHER; note = 2'-deoxy-2'-fluoroguanosine-3'-phosphate
  modified_base 11: mod_base = OTHER; note = 2'-deoxy-2'-fluorouridine-3'-phosphate
  modified_base 12: mod_base = OTHER; note = 2'-O-methylcytidine-3'-phosphate
  modified_base 13: mod_base = OTHER; note = 2'-O-methyluridine-3'-phosphate
  modified_base 14: mod_base = OTHER; note = 2'-O-methylguanosine-3'-phosphate
  modified_base 15: mod_base = OTHER; note = 2'-O-methylcytidine-3'-phosphate
  modified_base 16: mod_base = OTHER; note = 2'-O-methylcytidine-3'-phosphate
  modified_base 17: mod_base = OTHER; note = 2'-O-methyluridine-3'-phosphate
  modified_base 18: mod_base = OTHER; note = 2'-O-methyladenosine-3'-phosphate
  modified_base 19: mod_base = OTHER; note = 2'-O-methyluridine-3'-phosphate
  modified_base 20: mod_base = OTHER; note = 2'-O-methylcytidine-3'-phosphate
  modified_base 21: mod_base = OTHER; note = 2'-O-methyladenosine-3'-phosphate ((2S,4R)-1-[29-[[2-(acetylamino)-2-deoxy-beta-D-galactopyra nosyl]oxy]-14,14-bis[[3-[[3-[[5-[[2-(acetylamino)-2-deoxy-b eta-D-galactopyranosyl]oxy]-1-oxopentyl]amino]propyl]amino] -3-oxopropoxy]methyl]-1,12,19,25-tetraoxo-16-oxa-13,20,24-t riazanonacos-1-yl]-4-hydroxy-2-pyrrolidinyl)methyl ester
aaatatcctgtctgcctatca

SEQ ID NO: 233 - RNA, 21 nt, synthetic construct
  source 1..21: mol_type = other RNA
  modified_base 1: mod_base = OTHER; note = 2'-O-methyladenosine-3'-phosphorothioate
  modified_base 2: mod_base = OTHER; note = 2'-O-methyladenosine-3'-phosphorothioate
  modified_base 3: mod_base = OTHER; note = 2'-O-methyluridine-3'-phosphate
  modified_base 4: mod_base = OTHER; note = 2'-O-methyladenosine-3'-phosphate
  modified_base 5: mod_base = OTHER; note = 2'-O-methyluridine-3'-phosphate
  modified_base 6: mod_base = OTHER; note = 2'-O-methylcytidine-3'-phosphate
  modified_base 7: mod_base = OTHER; note = 2'-deoxy-2'-fluorocytidine-3'-phosphate
  modified_base 8: mod_base = OTHER; note = 2'-O-methyluridine-3'-phosphate
  modified_base 9: mod_base = OTHER; note = 2'-deoxy-2'-fluoroguanosine-3'-phosphate
  modified_base 10: mod_base = OTHER; note = 2'-deoxy-2'-fluorouridine-3'-phosphate
  modified_base 11: mod_base = OTHER; note = 2'-deoxy-2'-fluorocytidine-3'-phosphate
  modified_base 12: mod_base = OTHER; note = 2'-O-methyluridine-3'-phosphate
  modified_base 13: mod_base = OTHER; note = 2'-O-methylguanosine-3'-phosphate
  modified_base 14: mod_base = OTHER; note = 2'-O-methylcytidine-3'-phosphate
  modified_base 15: mod_base = OTHER; note = 2'-O-methylcytidine-3'-phosphate
  modified_base 16: mod_base = OTHER; note = 2'-O-methyluridine-3'-phosphate
  modified_base 17: mod_base = OTHER; note = 2'-O-methyladenosine-3'-phosphate
  modified_base 18: mod_base = OTHER; note = 2'-O-methyluridine-3'-phosphate
  modified_base 19: mod_base = OTHER; note = 2'-O-methylcytidine-3'-phosphate
  modified_base 20: mod_base = OTHER; note = 2'-O-methyladenosine-3'-phosphate
  modified_base 21: mod_base = OTHER; note = 2'-O-methyladenosine-3'-phosphate ((2S,4R)-1-[29-[[2-(acetylamino)-2-deoxy-beta-D-galactopyra nosyl]oxy]-14,14-bis[[3-[[3-[[5-[[2-(acetylamino)-2-deoxy-b eta-D-galactopyranosyl]oxy]-1-oxopentyl]amino]propyl]amino] -3-oxopropoxy]methyl]-1,12,19,25-tetraoxo-16-oxa-13,20,24-t riazanonacos-1-yl]-4-hydroxy-2-pyrrolidinyl)methyl ester
aatatcctgtctgcctatcaa

SEQ ID NO: 234 - RNA, 21 nt, synthetic construct
  source 1..21: mol_type = other RNA
  modified_base 1: mod_base = OTHER; note = 2'-O-methylcytidine-3'-phosphorothioate
  modified_base 2: mod_base = OTHER; note = 2'-O-methyladenosine-3'-phosphorothioate
  modified_base 3: mod_base = OTHER; note = 2'-O-methylguanosine-3'-phosphate
  modified_base 4: mod_base = OTHER; note = 2'-O-methylguanosine-3'-phosphate
  modified_base 5: mod_base = OTHER; note = 2'-O-methylcytidine-3'-phosphate
  modified_base 6: mod_base = OTHER; note = 2'-O-methyluridine-3'-phosphate
  modified_base 7: mod_base = OTHER; note = 2'-deoxy-2'-fluorocytidine-3'-phosphate
  modified_base 8: mod_base = OTHER; note = 2'-O-methyluridine-3'-phosphate
  modified_base 9: mod_base = OTHER; note = 2'-deoxy-2'-fluoroguanosine-3'-phosphate
  modified_base 10: mod_base = OTHER; note = 2'-deoxy-2'-fluoroadenosine-3'-phosphate
  modified_base 11: mod_base = OTHER; note = 2'-deoxy-2'-fluoroadenosine-3'-phosphate
  modified_base 12: mod_base = OTHER; note = 2'-O-methylcytidine-3'-phosphate
  modified_base 13: mod_base = OTHER; note = 2'-O-methyluridine-3'-phosphate
  modified_base 14: mod_base = OTHER; note = 2'-O-methyladenosine-3'-phosphate
  modified_base 15: mod_base = OTHER; note = 2'-O-methyluridine-3'-phosphate
  modified_base 16: mod_base = OTHER; note = 2'-O-methylguanosine-3'-phosphate
  modified_base 17: mod_base = OTHER; note = 2'-O-methyladenosine-3'-phosphate
  modified_base 18: mod_base = OTHER; note = 2'-O-methyladenosine-3'-phosphate
  modified_base 19: mod_base = OTHER; note = 2'-O-methyladenosine-3'-phosphate
  modified_base 20: mod_base = OTHER; note = 2'-O-methyluridine-3'-phosphate
  modified_base 21: mod_base = OTHER; note = 2'-O-methyladenosine-3'-phosphate ((2S,4R)-1-[29-[[2-(acetylamino)-2-deoxy-beta-D-galactopyra nosyl]oxy]-14,14-bis[[3-[[3-[[5-[[2-(acetylamino)-2-deoxy-b eta-D-galactopyranosyl]oxy]-1-oxopentyl]amino]propyl]amino] -3-oxopropoxy]methyl]-1,12,19,25-tetraoxo-16-oxa-13,20,24-t riazanonacos-1-yl]-4-hydroxy-2-pyrrolidinyl)methyl ester
caggctctgaactatgaaata

SEQ ID NO: 235 - RNA, 21 nt, synthetic construct
  source 1..21: mol_type = other RNA
  modified_base 1: mod_base = OTHER; note = 2'-O-methyladenosine-3'-phosphorothioate
  modified_base 2: mod_base = OTHER; note = 2'-O-methylguanosine-3'-phosphorothioate
  modified_base 3: mod_base = OTHER; note = 2'-O-methylguanosine-3'-phosphate
  modified_base 4: mod_base = OTHER; note = 2'-O-methylcytidine-3'-phosphate
  modified_base 5: mod_base = OTHER; note = 2'-O-methyluridine-3'-phosphate
  modified_base 6: mod_base = OTHER; note = 2'-O-methylcytidine-3'-phosphate
  modified_base 7: mod_base = OTHER; note = 2'-deoxy-2'-fluorouridine-3'-phosphate
  modified_base 8: mod_base = OTHER; note = 2'-O-methylguanosine-3'-phosphate
  modified_base 9: mod_base = OTHER; note = 2'-deoxy-2'-fluoroadenosine-3'-phosphate
  modified_base 10: mod_base = OTHER; note = 2'-deoxy-2'-fluoroadenosine-3'-phosphate
  modified_base 11: mod_base = OTHER; note = 2'-deoxy-2'-fluorocytidine-3'-phosphate
  modified_base 12: mod_base = OTHER; note = 2'-O-methyluridine-3'-phosphate
  modified_base 13: mod_base = OTHER; note = 2'-O-methyladenosine-3'-phosphate
  modified_base 14: mod_base = OTHER; note = 2'-O-methyluridine-3'-phosphate
  modified_base 15: mod_base = OTHER; note = 2'-O-methylguanosine-3'-phosphate
  modified_base 16: mod_base = OTHER; note = 2'-O-methyladenosine-3'-phosphate
  modified_base 17: mod_base = OTHER; note = 2'-O-methyladenosine-3'-phosphate
  modified_base 18: mod_base = OTHER; note = 2'-O-methyladenosine-3'-phosphate
  modified_base 19: mod_base = OTHER; note = 2'-O-methyluridine-3'-phosphate
  modified_base 20: mod_base = OTHER; note = 2'-O-methylcytidine-3'-phosphate
  modified_base 21: mod_base = OTHER; note = 2'-O-methyladenosine-3'-phosphate ((2S,4R)-1-[29-[[2-(acetylamino)-2-deoxy-beta-D-galactopyra nosyl]oxy]-14,14-bis[[3-[[3-[[5-[[2-(acetylamino)-2-deoxy-b eta-D-galactopyranosyl]oxy]-1-oxopentyl]amino]propyl]amino] -3-oxopropoxy]methyl]-1,12,19,25-tetraoxo-16-oxa-13,20,24-t riazanonacos-1-yl]-4-hydroxy-2-pyrrolidinyl)methyl ester
aggctctgaactatgaaatca

SEQ ID NO: 236 - RNA, 21 nt, synthetic construct
  source 1..21: mol_type = other RNA
  modified_base 1: mod_base = OTHER; note = 2'-O-methylguanosine-3'-phosphorothioate
  modified_base 2: mod_base = OTHER; note = 2'-O-methylguanosine-3'-phosphorothioate
  modified_base 3: mod_base = OTHER; note = 2'-O-methylcytidine-3'-phosphate
  modified_base 4: mod_base = OTHER; note = 2'-O-methyluridine-3'-phosphate
  modified_base 5: mod_base = OTHER; note = 2'-O-methylcytidine-3'-phosphate
  modified_base 6: mod_base = OTHER; note = 2'-O-methyluridine-3'-phosphate
  modified_base 7: mod_base = OTHER; note = 2'-deoxy-2'-fluoroguanosine-3'-phosphate
  modified_base 8: mod_base = OTHER; note = 2'-O-methyladenosine-3'-phosphate
  modified_base 9: mod_base = OTHER; note = 2'-deoxy-2'-fluoroadenosine-3'-phosphate
  modified_base 10: mod_base = OTHER; note = 2'-deoxy-2'-fluorocytidine-3'-phosphate
  modified_base 11: mod_base = OTHER; note = 2'-deoxy-2'-fluorouridine-3'-phosphate
  modified_base 12: mod_base = OTHER; note = 2'-O-methyladenosine-3'-phosphate
  modified_base 13: mod_base = OTHER; note = 2'-O-methyluridine-3'-phosphate
  modified_base 14: mod_base = OTHER; note = 2'-O-methylguanosine-3'-phosphate
  modified_base 15: mod_base = OTHER; note = 2'-O-methyladenosine-3'-phosphate
  modified_base 16: mod_base = OTHER; note = 2'-O-methyladenosine-3'-phosphate
  modified_base 17: mod_base = OTHER; note = 2'-O-methyladenosine-3'-phosphate
  modified_base 18: mod_base = OTHER; note = 2'-O-methyluridine-3'-phosphate
  modified_base 19: mod_base = OTHER; note = 2'-O-methylcytidine-3'-phosphate
  modified_base 20: mod_base = OTHER; note = 2'-O-methyladenosine-3'-phosphate
  modified_base 21: mod_base = OTHER; note = 2'-O-methyladenosine-3'-phosphate ((2S,4R)-1-[29-[[2-(acetylamino)-2-deoxy-beta-D-galactopyra nosyl]oxy]-14,14-bis[[3-[[3-[[5-[[2-(acetylamino)-2-deoxy-b eta-D-galactopyranosyl]oxy]-1-oxopentyl]amino]propyl]amino] -3-oxopropoxy]methyl]-1,12,19,25-tetraoxo-16-oxa-13,20,24-t riazanonacos-1-yl]-4-hydroxy-2-pyrrolidinyl)methyl ester
ggctctgaactatgaaatcaa

SEQ ID NO: 237 - RNA, 21 nt, synthetic construct
  source 1..21: mol_type = other RNA
  modified_base 1: mod_base = OTHER; note = 2'-O-methylguanosine-3'-phosphorothioate
  modified_base 2: mod_base = OTHER; note = 2'-O-methylcytidine-3'-phosphorothioate
  modified_base 3: mod_base = OTHER; note = 2'-O-methyluridine-3'-phosphate
  modified_base 4: mod_base = OTHER; note = 2'-O-methylcytidine-3'-phosphate
  modified_base 5: mod_base = OTHER; note = 2'-O-methyluridine-3'-phosphate
  modified_base 6: mod_base = OTHER; note = 2'-O-methylguanosine-3'-phosphate
  modified_base 7: mod_base = OTHER; note = 2'-deoxy-2'-fluoroadenosine-3'-phosphate
  modified_base 8: mod_base = OTHER; note = 2'-O-methyladenosine-3'-phosphate
  modified_base 9: mod_base = OTHER; note = 2'-deoxy-2'-fluorocytidine-3'-phosphate
  modified_base 10: mod_base = OTHER; note = 2'-deoxy-2'-fluorouridine-3'-phosphate
  modified_base 11: mod_base = OTHER; note = 2'-deoxy-2'-fluoroadenosine-3'-phosphate
  modified_base 12: mod_base = OTHER; note = 2'-O-methyluridine-3'-phosphate
  modified_base 13: mod_base = OTHER; note = 2'-O-methylguanosine-3'-phosphate
  modified_base 14: mod_base = OTHER; note = 2'-O-methyladenosine-3'-phosphate
  modified_base 15: mod_base = OTHER; note = 2'-O-methyladenosine-3'-phosphate
  modified_base 16: mod_base = OTHER; note = 2'-O-methyladenosine-3'-phosphate
  modified_base 17: mod_base = OTHER; note = 2'-O-methyluridine-3'-phosphate
  modified_base 18: mod_base = OTHER; note = 2'-O-methylcytidine-3'-phosphate
  modified_base 19: mod_base = OTHER; note = 2'-O-methyladenosine-3'-phosphate
  modified_base 20: mod_base = OTHER; note = 2'-O-methylguanosine-3'-phosphate
  modified_base 21: mod_base = OTHER; note = 2'-O-methyladenosine-3'-phosphate ((2S,4R)-1-[29-[[2-(acetylamino)-2-deoxy-beta-D-galactopyra nosyl]oxy]-14,14-bis[[3-[[3-[[5-[[2-(acetylamino)-2-deoxy-b eta-D-galactopyranosyl]oxy]-1-oxopentyl]amino]propyl]amino] -3-oxopropoxy]methyl]-1,12,19,25-tetraoxo-16-oxa-13,20,24-t riazanonacos-1-yl]-4-hydroxy-2-pyrrolidinyl)methyl ester
gctctgaactatgaaatcaga

SEQ ID NO: 238 - RNA, 21 nt, synthetic construct
  source 1..21: mol_type = other RNA
  modified_base 1: mod_base = OTHER; note = 2'-O-methylguanosine-3'-phosphorothioate
  modified_base 2: mod_base = OTHER; note = 2'-O-methyladenosine-3'-phosphorothioate
  modified_base 3: mod_base = OTHER; note = 2'-O-methylguanosine-3'-phosphate
  modified_base 4: mod_base = OTHER; note = 2'-O-methylguanosine-3'-phosphate
  modified_base 5: mod_base = OTHER; note = 2'-O-methyladenosine-3'-phosphate
  modified_base 6: mod_base = OTHER; note = 2'-O-methyluridine-3'-phosphate
  modified_base 7: mod_base = OTHER; note = 2'-deoxy-2'-fluoroadenosine-3'-phosphate
  modified_base 8: mod_base = OTHER; note = 2'-O-methyluridine-3'-phosphate
  modified_base 9: mod_base = OTHER; note = 2'-deoxy-2'-fluoroguanosine-3'-phosphate
  modified_base 10: mod_base = OTHER; note = 2'-deoxy-2'-fluorouridine-3'-phosphate
  modified_base 11: mod_base = OTHER; note = 2'-deoxy-2'-fluorocytidine-3'-phosphate
  modified_base 12: mod_base = OTHER; note = 2'-O-methyladenosine-3'-phosphate
  modified_base 13: mod_base = OTHER; note = 2'-O-methyluridine-3'-phosphate
  modified_base 14: mod_base = OTHER; note = 2'-O-methylcytidine-3'-phosphate
  modified_base 15: mod_base = OTHER; note = 2'-O-methyladenosine-3'-phosphate
  modified_base 16: mod_base = OTHER; note = 2'-O-methyluridine-3'-phosphate
  modified_base 17: mod_base = OTHER; note = 2'-O-methylcytidine-3'-phosphate
  modified_base 18: mod_base = OTHER; note = 2'-O-methyladenosine-3'-phosphate
  modified_base 19: mod_base = OTHER; note = 2'-O-methyladenosine-3'-phosphate
  modified_base 20: mod_base = OTHER; note = 2'-O-methyladenosine-3'-phosphate
  modified_base 21: mod_base = OTHER; note = 2'-O-methyladenosine-3'-phosphate ((2S,4R)-1-[29-[[2-(acetylamino)-2-deoxy-beta-D-galactopyra nosyl]oxy]-14,14-bis[[3-[[3-[[5-[[2-(acetylamino)-2-deoxy-b eta-D-galactopyranosyl]oxy]-1-oxopentyl]amino]propyl]amino] -3-oxopropoxy]methyl]-1,12,19,25-tetraoxo-16-oxa-13,20,24-t riazanonacos-1-yl]-4-hydroxy-2-pyrrolidinyl)methyl ester
gaggatatgtcatcatcaaaa

SEQ ID NO: 239 - RNA, 21 nt, synthetic construct
  source 1..21: mol_type = other RNA
  modified_base 1: mod_base = OTHER; note = 2'-O-methyluridine-3'-phosphorothioate
  modified_base 2: mod_base = OTHER; note = 2'-O-methyladenosine-3'-phosphorothioate
  modified_base 3: mod_base = OTHER; note = 2'-O-methyluridine-3'-phosphate
  modified_base 4: mod_base = OTHER; note = 2'-O-methylguanosine-3'-phosphate
  modified_base 5: mod_base = OTHER; note = 2'-O-methyluridine-3'-phosphate
  modified_base 6: mod_base = OTHER; note = 2'-O-methylcytidine-3'-phosphate
  modified_base 7: mod_base = OTHER; note = 2'-deoxy-2'-fluoroadenosine-3'-phosphate
  modified_base 8: mod_base = OTHER; note = 2'-O-methyluridine-3'-phosphate
  modified_base 9: mod_base = OTHER; note = 2'-deoxy-2'-fluorocytidine-3'-phosphate
  modified_base 10: mod_base = OTHER; note = 2'-deoxy-2'-fluoroadenosine-3'-phosphate
  modified_base 11: mod_base = OTHER; note = 2'-deoxy-2'-fluorouridine-3'-phosphate
  modified_base 12: mod_base = OTHER; note = 2'-O-methylcytidine-3'-phosphate
  modified_base 13: mod_base = OTHER; note = 2'-O-methyladenosine-3'-phosphate
  modified_base 14: mod_base = OTHER; note = 2'-O-methyladenosine-3'-phosphate
  modified_base 15: mod_base = OTHER; note = 2'-O-methyladenosine-3'-phosphate
  modified_base 16: mod_base = OTHER; note = 2'-O-methylcytidine-3'-phosphate
  modified_base 17: mod_base = OTHER; note = 2'-O-methylcytidine-3'-phosphate
  modified_base 18: mod_base = OTHER; note = 2'-O-methylcytidine-3'-phosphate
  modified_base 19: mod_base = OTHER; note = 2'-O-methyluridine-3'-phosphate
  modified_base 20: mod_base = OTHER; note = 2'-O-methyluridine-3'-phosphate
  modified_base 21: mod_base = OTHER; note = 2'-O-methyladenosine-3'-phosphate ((2S,4R)-1-[29-[[2-(acetylamino)-2-deoxy-beta-D-galactopyra nosyl]oxy]-14,14-bis[[3-[[3-[[5-[[2-(acetylamino)-2-deoxy-b eta-D-galactopyranosyl]oxy]-1-oxopentyl]amino]propyl]amino] -3-oxopropoxy]methyl]-1,12,19,25-tetraoxo-16-oxa-13,20,24-t riazanonacos-1-yl]-4-hydroxy-2-pyrrolidinyl)methyl ester
tatgtcatcatcaaaccctta

SEQ ID NO: 240 - RNA, 21 nt, synthetic construct
  source 1..21: mol_type = other RNA
  modified_base 1: mod_base = OTHER; note = 2'-O-methylcytidine-3'-phosphorothioate
  modified_base 2: mod_base = OTHER; note = 2'-O-methyladenosine-3'-phosphorothioate
  modified_base 3: mod_base = OTHER; note = 2'-O-methyluridine-3'-phosphate
  modified_base 4: mod_base = OTHER; note = 2'-O-methylcytidine-3'-phosphate
  modified_base 5: mod_base = OTHER; note = 2'-O-methyladenosine-3'-phosphate
  modified_base 6: mod_base = OTHER; note = 2'-O-methyluridine-3'-phosphate
  modified_base 7: mod_base = OTHER; note = 2'-deoxy-2'-fluorocytidine-3'-phosphate
  modified_base 8: mod_base = OTHER; note = 2'-O-methyladenosine-3'-phosphate
  modified_base 9: mod_base = OTHER; note = 2'-deoxy-2'-fluoroadenosine-3'-phosphate
  modified_base 10: mod_base = OTHER; note = 2'-deoxy-2'-fluoroadenosine-3'-phosphate
  modified_base 11: mod_base = OTHER; note = 2'-deoxy-2'-fluorocytidine-3'-phosphate
  modified_base 12: mod_base = OTHER; note = 2'-O-methylcytidine-3'-phosphate
  modified_base 13: mod_base = OTHER; note = 2'-O-methylcytidine-3'-phosphate
  modified_base 14: mod_base = OTHER; note = 2'-O-methyluridine-3'-phosphate
  modified_base 15: mod_base = OTHER; note = 2'-O-methyluridine-3'-phosphate
  modified_base 16: mod_base = OTHER; note = 2'-O-methylguanosine-3'-phosphate
  modified_base 17: mod_base = OTHER; note = 2'-O-methylguanosine-3'-phosphate
  modified_base 18: mod_base = OTHER; note = 2'-O-methyluridine-3'-phosphate
  modified_base 19: mod_base = OTHER; note = 2'-O-methylguanosine-3'-phosphate
  modified_base 20: mod_base = OTHER; note = 2'-O-methyluridine-3'-phosphate
  modified_base 21: mod_base = OTHER; note = 2'-O-methyladenosine-3'-phosphate ((2S,4R)-1-[29-[[2-(acetylamino)-2-deoxy-beta-D-galactopyra nosyl]oxy]-14,14-bis[[3-[[3-[[5-[[2-(acetylamino)-2-deoxy-b eta-D-galactopyranosyl]oxy]-1-oxopentyl]amino]propyl]amino] -3-oxopropoxy]methyl]-1,12,19,25-tetraoxo-16-oxa-13,20,24-t riazanonacos-1-yl]-4-hydroxy-2-pyrrolidinyl)methyl ester
catcatcaaacccttggtgta

SEQ ID NO: 241 - RNA, 21 nt, synthetic construct
  source 1..21: mol_type = other RNA
  modified_base 1: mod_base = OTHER; note = 2'-O-methyladenosine-3'-phosphorothioate
  modified_base 2: mod_base = OTHER; note = 2'-O-methyladenosine-3'-phosphorothioate
  modified_base 3: mod_base = OTHER; note = 2'-O-methylcytidine-3'-phosphate
  modified_base 4: mod_base = OTHER; note = 2'-O-methylguanosine-3'-phosphate
  modified_base 5: mod_base = OTHER; note = 2'-O-methyladenosine-3'-phosphate
  modified_base 6: mod_base = OTHER; note = 2'-O-methylguanosine-3'-phosphate
  modified_base 7: mod_base = OTHER; note = 2'-deoxy-2'-fluoroadenosine-3'-phosphate
  modified_base 8: mod_base = OTHER; note = 2'-O-methylguanosine-3'-phosphate
  modified_base 9: mod_base = OTHER; note = 2'-deoxy-2'-fluorocytidine-3'-phosphate
  modified_base 10: mod_base = OTHER; note = 2'-deoxy-2'-fluoroadenosine-3'-phosphate
  modified_base 11: mod_base = OTHER; note = 2'-deoxy-2'-fluorocytidine-3'-phosphate
  modified_base 12: mod_base = OTHER; note = 2'-O-methyluridine-3'-phosphate
  modified_base 13: mod_base = OTHER; note = 2'-O-methyluridine-3'-phosphate
  modified_base 14: mod_base = OTHER; note = 2'-O-methylguanosine-3'-phosphate
  modified_base 15: mod_base = OTHER; note = 2'-O-methyladenosine-3'-phosphate
  modified_base 16: mod_base = OTHER; note = 2'-O-methyladenosine-3'-phosphate
  modified_base 17: mod_base = OTHER; note = 2'-O-methyladenosine-3'-phosphate
  modified_base 18: mod_base = OTHER; note = 2'-O-methyladenosine-3'-phosphate
  modified_base 19: mod_base = OTHER; note = 2'-O-methyluridine-3'-phosphate
  modified_base 20: mod_base = OTHER; note = 2'-O-methylguanosine-3'-phosphate
  modified_base 21: mod_base = OTHER; note = 2'-O-methyladenosine-3'-phosphate ((2S,4R)-1-[29-[[2-(acetylamino)-2-deoxy-beta-D-galactopyra nosyl]oxy]-14,14-bis[[3-[[3-[[5-[[2-(acetylamino)-2-deoxy-b eta-D-galactopyranosyl]oxy]-1-oxopentyl]amino]propyl]amino] -3-oxopropoxy]methyl]-1,12,19,25-tetraoxo-16-oxa-13,20,24-t riazanonacos-1-yl]-4-hydroxy-2-pyrrolidinyl)methyl ester
aacgagagcacttgaaaatga

SEQ ID NO: 242 - RNA, 21 nt, synthetic construct
  source 1..21: mol_type = other RNA
  modified_base 1: mod_base = OTHER; note = 2'-O-methylcytidine-3'-phosphorothioate
  modified_base 2: mod_base = OTHER; note = 2'-O-methylguanosine-3'-phosphorothioate
  modified_base 3: mod_base = OTHER; note = 2'-O-methyladenosine-3'-phosphate
  modified_base 4: mod_base = OTHER; note = 2'-O-methylguanosine-3'-phosphate
  modified_base 5: mod_base = OTHER; note = 2'-O-methyladenosine-3'-phosphate
  modified_base 6: mod_base = OTHER; note = 2'-O-methylguanosine-3'-phosphate
  modified_base 7: mod_base = OTHER; note = 2'-deoxy-2'-fluorocytidine-3'-phosphate
  modified_base 8: mod_base = OTHER; note = 2'-O-methyladenosine-3'-phosphate
  modified_base 9: mod_base = OTHER; note = 2'-deoxy-2'-fluorocytidine-3'-phosphate
  modified_base 10: mod_base = OTHER; note = 2'-deoxy-2'-fluorouridine-3'-phosphate
  modified_base 11: mod_base = OTHER; note = 2'-deoxy-2'-fluorouridine-3'-phosphate
  modified_base 12: mod_base = OTHER; note = 2'-O-methylguanosine-3'-phosphate
  modified_base 13: mod_base = OTHER; note = 2'-O-methyladenosine-3'-phosphate
  modified_base 14: mod_base = OTHER; note = 2'-O-methyladenosine-3'-phosphate
  modified_base 15: mod_base = OTHER; note = 2'-O-methyladenosine-3'-phosphate
  modified_base 16: mod_base = OTHER; note = 2'-O-methyladenosine-3'-phosphate
  modified_base 17: mod_base = OTHER; note = 2'-O-methyluridine-3'-phosphate
  modified_base 18: mod_base = OTHER; note = 2'-O-methylguanosine-3'-phosphate
  modified_base 19: mod_base = OTHER; note = 2'-O-methyladenosine-3'-phosphate
  modified_base 20: mod_base = OTHER; note = 2'-O-methyladenosine-3'-phosphate
  modified_base 21: mod_base = OTHER; note = 2'-O-methyladenosine-3'-phosphate ((2S,4R)-1-[29-[[2-(acetylamino)-2-deoxy-beta-D-galactopyra nosyl]oxy]-14,14-bis[[3-[[3-[[5-[[2-(acetylamino)-2-deoxy-b eta-D-galactopyranosyl]oxy]-1-oxopentyl]amino]propyl]amino] -3-oxopropoxy]methyl]-1,12,19,25-tetraoxo-16-oxa-13,20,24-t riazanonacos-1-yl]-4-hydroxy-2-pyrrolidinyl)methyl ester
cgagagcacttgaaaatgaaa

SEQ ID NO: 243 - RNA, 21 nt, synthetic construct
  source 1..21: mol_type = other RNA
  modified_base 1: mod_base = OTHER; note = 2'-O-methyladenosine-3'-phosphorothioate
  modified_base 2: mod_base = OTHER; note = 2'-O-methylguanosine-3'-phosphorothioate
  modified_base 3: mod_base = OTHER; note = 2'-O-methylcytidine-3'-phosphate
  modified_base 4: mod_base = OTHER; note = 2'-O-methyladenosine-3'-phosphate
  modified_base 5: mod_base = OTHER; note = 2'-O-methylcytidine-3'-phosphate
  modified_base 6: mod_base = OTHER; note = 2'-O-methyluridine-3'-phosphate
  modified_base 7: mod_base = OTHER; note = 2'-deoxy-2'-fluorouridine-3'-phosphate
  modified_base 8: mod_base = OTHER; note = 2'-O-methylguanosine-3'-phosphate
  modified_base 9: mod_base = OTHER; note = 2'-deoxy-2'-fluoroadenosine-3'-phosphate
  modified_base 10: mod_base = OTHER; note = 2'-deoxy-2'-fluoroadenosine-3'-phosphate
  modified_base 11: mod_base = OTHER; note = 2'-deoxy-2'-fluoroadenosine-3'-phosphate
  modified_base 12: mod_base = OTHER; note = 2'-O-methyladenosine-3'-phosphate
  modified_base 13: mod_base = OTHER; note = 2'-O-methyluridine-3'-phosphate
  modified_base 14: mod_base = OTHER; note = 2'-O-methylguanosine-3'-phosphate
  modified_base 15: mod_base = OTHER; note = 2'-O-methyladenosine-3'-phosphate
  modified_base 16: mod_base = OTHER; note = 2'-O-methyladenosine-3'-phosphate
  modified_base 17: mod_base = OTHER; note = 2'-O-methyladenosine-3'-phosphate
  modified_base 18: mod_base = OTHER; note = 2'-O-methyluridine-3'-phosphate
  modified_base 19: mod_base = OTHER; note = 2'-O-methylguanosine-3'-phosphate
  modified_base 20: mod_base = OTHER; note = 2'-O-methyladenosine-3'-phosphate
  modified_base 21: mod_base = OTHER; note = 2'-O-methyladenosine-3'-phosphate ((2S,4R)-1-[29-[[2-(acetylamino)-2-deoxy-beta-D-galactopyra nosyl]oxy]-14,14-bis[[3-[[3-[[5-[[2-(acetylamino)-2-deoxy-b eta-D-galactopyranosyl]oxy]-1-oxopentyl]amino]propyl]amino] -3-oxopropoxy]methyl]-1,12,19,25-tetraoxo-16-oxa-13,20,24-t riazanonacos-1-yl]-4-hydroxy-2-pyrrolidinyl)methyl ester
agcacttgaaaatgaaatgaa

SEQ ID NO: 244 - RNA, 21 nt, synthetic construct
  source 1..21: mol_type = other RNA
  modified_base 1: mod_base = OTHER; note = 2'-O-methylguanosine-3'-phosphorothioate
  modified_base 2: mod_base = OTHER; note = 2'-O-methylcytidine-3'-phosphorothioate
  modified_base 3: mod_base = OTHER; note = 2'-O-methyladenosine-3'-phosphate
  modified_base 4: mod_base = OTHER; note = 2'-O-methylcytidine-3'-phosphate
  modified_base 5: mod_base = OTHER; note = 2'-O-methyluridine-3'-phosphate
  modified_base 6: mod_base = OTHER; note = 2'-O-methyluridine-3'-phosphate
  modified_base 7: mod_base = OTHER; note = 2'-deoxy-2'-fluoroguanosine-3'-phosphate
  modified_base 8: mod_base = OTHER; note = 2'-O-methyladenosine-3'-phosphate
  modified_base 9: mod_base = OTHER; note = 2'-deoxy-2'-fluoroadenosine-3'-phosphate
  modified_base 10: mod_base = OTHER; note = 2'-deoxy-2'-fluoroadenosine-3'-phosphate
  modified_base 11: mod_base = OTHER; note = 2'-deoxy-2'-fluoroadenosine-3'-phosphate
  modified_base 12: mod_base = OTHER; note = 2'-O-methyluridine-3'-phosphate
  modified_base 13: mod_base = OTHER; note = 2'-O-methylguanosine-3'-phosphate
  modified_base 14: mod_base = OTHER; note = 2'-O-methyladenosine-3'-phosphate
  modified_base 15: mod_base = OTHER; note = 2'-O-methyladenosine-3'-phosphate
  modified_base 16: mod_base = OTHER; note = 2'-O-methyladenosine-3'-phosphate
  modified_base 17: mod_base = OTHER; note = 2'-O-methyluridine-3'-phosphate
  modified_base 18: mod_base = OTHER; note = 2'-O-methylguanosine-3'-phosphate
  modified_base 19: mod_base = OTHER; note = 2'-O-methyladenosine-3'-phosphate
  modified_base 20: mod_base = OTHER; note = 2'-O-methylcytidine-3'-phosphate
  modified_base 21: mod_base = OTHER; note = 2'-O-methyladenosine-3'-phosphate ((2S,4R)-1-[29-[[2-(acetylamino)-2-deoxy-beta-D-galactopyra nosyl]oxy]-14,14-bis[[3-[[3-[[5-[[2-(acetylamino)-2-deoxy-b eta-D-galactopyranosyl]oxy]-1-oxopentyl]amino]propyl]amino] -3-oxopropoxy]methyl]-1,12,19,25-tetraoxo-16-oxa-13,20,24-t riazanonacos-1-yl]-4-hydroxy-2-pyrrolidinyl)methyl ester
gcacttgaaaatgaaatgaca

SEQ ID NO: 245 - RNA, 21 nt, synthetic construct
  source 1..21: mol_type = other RNA
  modified_base 1: mod_base = OTHER; note = 2'-O-methyladenosine-3'-phosphorothioate
  modified_base 2: mod_base = OTHER; note = 2'-O-methyladenosine-3'-phosphorothioate
  modified_base 3: mod_base = OTHER; note = 2'-O-methyladenosine-3'-phosphate
  modified_base 4: mod_base = OTHER; note = 2'-O-methyluridine-3'-phosphate
  modified_base 5: mod_base = OTHER; note = 2'-O-methylguanosine-3'-phosphate
  modified_base 6: mod_base = OTHER; note = 2'-O-methyladenosine-3'-phosphate
  modified_base 7: mod_base = OTHER; note = 2'-deoxy-2'-fluoroadenosine-3'-phosphate
  modified_base 8: mod_base = OTHER; note = 2'-O-methyladenosine-3'-phosphate
  modified_base 9: mod_base = OTHER; note = 2'-deoxy-2'-fluorouridine-3'-phosphate
  modified_base 10: mod_base = OTHER; note = 2'-deoxy-2'-fluoroguanosine-3'-phosphate
  modified_base 11: mod_base = OTHER; note = 2'-deoxy-2'-fluoroadenosine-3'-phosphate
  modified_base 12: mod_base = OTHER; note = 2'-O-methylcytidine-3'-phosphate
  modified_base 13: mod_base = OTHER; note = 2'-O-methyluridine-3'-phosphate
  modified_base 14: mod_base = OTHER; note = 2'-O-methylguanosine-3'-phosphate
  modified_base 15: mod_base = OTHER; note = 2'-O-methyluridine-3'-phosphate
  modified_base 16: mod_base = OTHER; note = 2'-O-methylcytidine-3'-phosphate
  modified_base 17: mod_base = OTHER; note = 2'-O-methyluridine-3'-phosphate
  modified_base 18: mod_base = OTHER; note = 2'-O-methyladenosine-3'-phosphate
  modified_base 19: mod_base = OTHER; note = 2'-O-methyladenosine-3'-phosphate
  modified_base 20: mod_base = OTHER; note = 2'-O-methylguanosine-3'-phosphate
  modified_base 21: mod_base = OTHER; note = 2'-O-methyladenosine-3'-phosphate ((2S,4R)-1-[29-[[2-(acetylamino)-2-deoxy-beta-D-galactopyra nosyl]oxy]-14,14-bis[[3-[[3-[[5-[[2-(acetylamino)-2-deoxy-b eta-D-galactopyranosyl]oxy]-1-oxopentyl]amino]propyl]amino] -3-oxopropoxy]methyl]-1,12,19,25-tetraoxo-16-oxa-13,20,24-t riazanonacos-1-yl]-4-hydroxy-2-pyrrolidinyl)methyl ester
aaatgaaatgactgtctaaga

SEQ ID NO: 246 - RNA, 21 nt, synthetic construct
  source 1..21: mol_type = other RNA
  modified_base 1: mod_base = OTHER; note = 2'-O-methyladenosine-3'-phosphorothioate
  modified_base 2: mod_base = OTHER; note = 2'-O-methyladenosine-3'-phosphorothioate
  modified_base 3: mod_base = OTHER; note = 2'-O-methyluridine-3'-phosphate
  modified_base 4: mod_base = OTHER; note = 2'-O-methylguanosine-3'-phosphate
  modified_base 5: mod_base = OTHER; note = 2'-O-methyladenosine-3'-phosphate
  modified_base 6: mod_base = OTHER; note = 2'-O-methyladenosine-3'-phosphate
  modified_base 7: mod_base = OTHER; note = 2'-deoxy-2'-fluoroadenosine-3'-phosphate
  modified_base 8: mod_base = OTHER; note = 2'-O-methyluridine-3'-phosphate
  modified_base 9: mod_base = OTHER; note = 2'-deoxy-2'-fluoroguanosine-3'-phosphate
  modified_base 10: mod_base = OTHER; note = 2'-deoxy-2'-fluoroadenosine-3'-phosphate
  modified_base 11: mod_base = OTHER; note = 2'-deoxy-2'-fluorocytidine-3'-phosphate
  modified_base 12: mod_base = OTHER; note = 2'-O-methyluridine-3'-phosphate
  modified_base 13: mod_base = OTHER; note = 2'-O-methylguanosine-3'-phosphate
  modified_base 14: mod_base = OTHER; note = 2'-O-methyluridine-3'-phosphate
  modified_base 15: mod_base = OTHER; note = 2'-O-methylcytidine-3'-phosphate
  modified_base 16: mod_base = OTHER; note = 2'-O-methyluridine-3'-phosphate
  modified_base 17: mod_base = OTHER; note = 2'-O-methyladenosine-3'-phosphate
  modified_base 18: mod_base = OTHER; note = 2'-O-methyladenosine-3'-phosphate
  modified_base 19: mod_base = OTHER; note = 2'-O-methylguanosine-3'-phosphate
  modified_base 20: mod_base = OTHER; note = 2'-O-methyladenosine-3'-phosphate
  modified_base 21: mod_base = OTHER; note = 2'-O-methyladenosine-3'-phosphate ((2S,4R)-1-[29-[[2-(acetylamino)-2-deoxy-beta-D-galactopyra nosyl]oxy]-14,14-bis[[3-[[3-[[5-[[2-(acetylamino)-2-deoxy-b eta-D-galactopyranosyl]oxy]-1-oxopentyl]amino]propyl]amino] -3-oxopropoxy]methyl]-1,12,19,25-tetraoxo-16-oxa-13,20,24-t riazanonacos-1-yl]-4-hydroxy-2-pyrrolidinyl)methyl ester
aatgaaatgactgtctaagaa

SEQ ID NO: 247 - RNA, 21 nt, synthetic construct
  source 1..21: mol_type = other RNA
  modified_base 1: mod_base = OTHER; note = 2'-O-methyluridine-3'-phosphorothioate
  modified_base 2: mod_base = OTHER; note = 2'-O-methylguanosine-3'-phosphorothioate
  modified_base 3: mod_base = OTHER; note = 2'-O-methyladenosine-3'-phosphate
  modified_base 4: mod_base = OTHER; note = 2'-O-methyladenosine-3'-phosphate
  modified_base 5: mod_base = OTHER; note = 2'-O-methyladenosine-3'-phosphate
  modified_base 6: mod_base = OTHER; note = 2'-O-methyluridine-3'-phosphate
  modified_base 7: mod_base = OTHER; note = 2'-deoxy-2'-fluoroguanosine-3'-phosphate
  modified_base 8: mod_base = OTHER; note = 2'-O-methyladenosine-3'-phosphate
  modified_base 9: mod_base = OTHER; note = 2'-deoxy-2'-fluorocytidine-3'-phosphate
  modified_base 10: mod_base = OTHER; note = 2'-deoxy-2'-fluorouridine-3'-phosphate
  modified_base 11: mod_base = OTHER; note = 2'-deoxy-2'-fluoroguanosine-3'-phosphate
  modified_base 12: mod_base = OTHER; note = 2'-O-methyluridine-3'-phosphate
  modified_base 13: mod_base = OTHER; note = 2'-O-methylcytidine-3'-phosphate
  modified_base 14: mod_base = OTHER; note = 2'-O-methyluridine-3'-phosphate
  modified_base 15: mod_base = OTHER; note = 2'-O-methyladenosine-3'-phosphate
  modified_base 16: mod_base = OTHER; note = 2'-O-methyladenosine-3'-phosphate
  modified_base 17: mod_base = OTHER; note = 2'-O-methylguanosine-3'-phosphate
  modified_base 18: mod_base = OTHER; note = 2'-O-methyladenosine-3'-phosphate
  modified_base 19: mod_base = OTHER; note = 2'-O-methylguanosine-3'-phosphate
  modified_base 20: mod_base = OTHER; note = 2'-O-methyladenosine-3'-phosphate
  modified_base 21: mod_base = OTHER; note = 2'-O-methyladenosine-3'-phosphate ((2S,4R)-1-[29-[[2-(acetylamino)-2-deoxy-beta-D-galactopyra nosyl]oxy]-14,14-bis[[3-[[3-[[5-[[2-(acetylamino)-2-deoxy-b eta-D-galactopyranosyl]oxy]-1-oxopentyl]amino]propyl]amino] -3-oxopropoxy]methyl]-1,12,19,25-tetraoxo-16-oxa-13,20,24-t riazanonacos-1-yl]-4-hydroxy-2-pyrrolidinyl)methyl ester
tgaaatgactgtctaagagaa

SEQ ID NO: 248 - RNA, 21 nt, synthetic construct
  source 1..21: mol_type = other RNA
  modified_base 1: mod_base = OTHER; note = 2'-O-methylguanosine-3'-phosphorothioate
  modified_base 2: mod_base = OTHER; note = 2'-O-methyladenosine-3'-phosphorothioate
  modified_base 3: mod_base = OTHER; note = 2'-O-methyladenosine-3'-phosphate
  modified_base 4: mod_base = OTHER; note = 2'-O-methyladenosine-3'-phosphate
  modified_base 5: mod_base = OTHER; note = 2'-O-methyluridine-3'-phosphate
  modified_base 6: mod_base = OTHER; note = 2'-O-methylguanosine-3'-phosphate
  modified_base 7: mod_base = OTHER; note = 2'-deoxy-2'-fluoroadenosine-3'-phosphate
  modified_base 8: mod_base = OTHER; note = 2'-O-methylcytidine-3'-phosphate
  modified_base 9: mod_base = OTHER; note = 2'-deoxy-2'-fluorouridine-3'-phosphate
  modified_base 10: mod_base = OTHER; note = 2'-deoxy-2'-fluoroguanosine-3'-phosphate
  modified_base 11: mod_base = OTHER; note = 2'-deoxy-2'-fluorouridine-3'-phosphate
  modified_base 12: mod_base = OTHER; note = 2'-O-methylcytidine-3'-phosphate
  modified_base 13: mod_base = OTHER; note = 2'-O-methyluridine-3'-phosphate
  modified_base 14: mod_base = OTHER; note = 2'-O-methyladenosine-3'-phosphate
  modified_base 15: mod_base = OTHER; note = 2'-O-methyladenosine-3'-phosphate
  modified_base 16: mod_base = OTHER; note = 2'-O-methylguanosine-3'-phosphate
  modified_base 17: mod_base = OTHER; note = 2'-O-methyladenosine-3'-phosphate
  modified_base 18: mod_base = OTHER; note = 2'-O-methylguanosine-3'-phosphate
  modified_base 19: mod_base = OTHER; note = 2'-O-methyladenosine-3'-phosphate
  modified_base 20: mod_base = OTHER; note = 2'-O-methyluridine-3'-phosphate
  modified_base 21: mod_base = OTHER; note = 2'-O-methyladenosine-3'-phosphate ((2S,4R)-1-[29-[[2-(acetylamino)-2-deoxy-beta-D-galactopyra nosyl]oxy]-14,14-bis[[3-[[3-[[5-[[2-(acetylamino)-2-deoxy-b eta-D-galactopyranosyl]oxy]-1-oxopentyl]amino]propyl]amino] -3-oxopropoxy]methyl]-1,12,19,25-tetraoxo-16-oxa-13,20,24-t riazanonacos-1-yl]-4-hydroxy-2-pyrrolidinyl)methyl ester
gaaatgactgtctaagagata

SEQ ID NO: 249 - RNA, 21 nt, synthetic construct
  source 1..21: mol_type = other RNA
  modified_base 1: mod_base = OTHER; note = 2'-O-methyladenosine-3'-phosphorothioate
  modified_base 2: mod_base = OTHER; note = 2'-O-methyladenosine-3'-phosphorothioate
  modified_base 3: mod_base = OTHER; note = 2'-O-methyladenosine-3'-phosphate
  modified_base 4: mod_base = OTHER; note = 2'-O-methyluridine-3'-phosphate
  modified_base 5: mod_base = OTHER; note = 2'-O-methylguanosine-3'-phosphate
  modified_base 6: mod_base = OTHER; note = 2'-O-methyladenosine-3'-phosphate
  modified_base 7: mod_base = OTHER; note = 2'-deoxy-2'-fluorocytidine-3'-phosphate
  modified_base 8: mod_base = OTHER; note = 2'-O-methyluridine-3'-phosphate
  modified_base 9: mod_base = OTHER; note = 2'-deoxy-2'-fluoroguanosine-3'-phosphate
  modified_base 10: mod_base = OTHER; note = 2'-deoxy-2'-fluorouridine-3'-phosphate
  modified_base 11: mod_base = OTHER; note = 2'-deoxy-2'-fluorocytidine-3'-phosphate
  modified_base 12: mod_base = OTHER; note = 2'-O-methyluridine-3'-phosphate
  modified_base 13: mod_base = OTHER; note = 2'-O-methyladenosine-3'-phosphate
  modified_base 14: mod_base = OTHER; note = 2'-O-methyladenosine-3'-phosphate
  modified_base 15: mod_base = OTHER; note = 2'-O-methylguanosine-3'-phosphate
  modified_base 16: mod_base = OTHER; note = 2'-O-methyladenosine-3'-phosphate
  modified_base 17: mod_base = OTHER; note = 2'-O-methylguanosine-3'-phosphate
  modified_base 18: mod_base = OTHER; note = 2'-O-methyladenosine-3'-phosphate
  modified_base 19: mod_base = OTHER; note = 2'-O-methyluridine-3'-phosphate
  modified_base 20: mod_base = OTHER; note = 2'-O-methylcytidine-3'-phosphate
  modified_base 21: mod_base = OTHER; note = 2'-O-methyladenosine-3'-phosphate ((2S,4R)-1-[29-[[2-(acetylamino)-2-deoxy-beta-D-galactopyra nosyl]oxy]-14,14-bis[[3-[[3-[[5-[[2-(acetylamino)-2-deoxy-b eta-D-galactopyranosyl]oxy]-1-oxopentyl]amino]propyl]amino] -3-oxopropoxy]methyl]-1,12,19,25-tetraoxo-16-oxa-13,20,24-t riazanonacos-1-yl]-4-hydroxy-2-pyrrolidinyl)methyl ester
aaatgactgtctaagagatca

SEQ ID NO: 250 - RNA, 21 nt, synthetic construct
  source 1..21: mol_type = other RNA
  modified_base 1: mod_base = OTHER; note = 2'-O-methylcytidine-3'-phosphorothioate
  modified_base 2: mod_base = OTHER; note = 2'-O-methyladenosine-3'-phosphorothioate
  modified_base 3: mod_base = OTHER; note = 2'-O-methyladenosine-3'-phosphate
  modified_base 4: mod_base = OTHER; note = 2'-O-methylcytidine-3'-phosphate
  modified_base 5: mod_base = OTHER; note = 2'-O-methyluridine-3'-phosphate
  modified_base 6: mod_base = OTHER; note = 2'-O-methylguanosine-3'-phosphate
  modified_base 7: mod_base = OTHER; note = 2'-deoxy-2'-fluoroguanosine-3'-phosphate
  modified_base 8: mod_base = OTHER; note = 2'-O-methyladenosine-3'-phosphate
  modified_base 9: mod_base = OTHER; note = 2'-deoxy-2'-fluorouridine-3'-phosphate
  modified_base 10: mod_base = OTHER; note = 2'-deoxy-2'-fluoroadenosine-3'-phosphate
  modified_base 11: mod_base = OTHER; note = 2'-deoxy-2'-fluorocytidine-3'-phosphate
  modified_base 12: mod_base = OTHER; note = 2'-O-methyluridine-3'-phosphate
  modified_base 13: mod_base = OTHER; note = 2'-O-methyladenosine-3'-phosphate
  modified_base 14: mod_base = OTHER; note = 2'-O-methylguanosine-3'-phosphate
  modified_base 15: mod_base = OTHER; note = 2'-O-methyladenosine-3'-phosphate
  modified_base 16: mod_base = OTHER; note = 2'-O-methyluridine-3'-phosphate
  modified_base 17: mod_base = OTHER; note = 2'-O-methylcytidine-3'-phosphate
  modified_base 18: mod_base = OTHER; note = 2'-O-methyluridine-3'-phosphate
  modified_base 19: mod_base = OTHER; note = 2'-O-methyluridine-3'-phosphate
  modified_base 20: mod_base = OTHER; note = 2'-O-methyladenosine-3'-phosphate
  modified_base 21: mod_base = OTHER; note = 2'-O-methyladenosine-3'-phosphate ((2S,4R)-1-[29-[[2-(acetylamino)-2-deoxy-beta-D-galactopyra nosyl]oxy]-14,14-bis[[3-[[3-[[5-[[2-(acetylamino)-2-deoxy-b eta-D-galactopyranosyl]oxy]-1-oxopentyl]amino]propyl]amino] -3-oxopropoxy]methyl]-1,12,19,25-tetraoxo-16-oxa-13,20,24-t riazanonacos-1-yl]-4-hydroxy-2-pyrrolidinyl)methyl ester
caactggatactagatcttaa

SEQ ID NO: 251 - RNA, 21 nt, synthetic construct
  source 1..21: mol_type = other RNA
  modified_base 1: mod_base = OTHER; note = 2'-O-methylguanosine-3'-phosphorothioate
  modified_base 2: mod_base = OTHER; note = 2'-O-methylcytidine-3'-phosphorothioate
  modified_base 3: mod_base = OTHER; note = 2'-O-methyladenosine-3'-phosphate
  modified_base 4: mod_base = OTHER; note = 2'-O-methylguanosine-3'-phosphate
  modified_base 5: mod_base = OTHER; note = 2'-O-methylcytidine-3'-phosphate
  modified_base 6: mod_base = OTHER; note = 2'-O-methyluridine-3'-phosphate
  modified_base 7: mod_base = OTHER; note = 2'-deoxy-2'-fluorocytidine-3'-phosphate
  modified_base 8: mod_base = OTHER; note = 2'-O-methyluridine-3'-phosphate
  modified_base 9: mod_base = OTHER; note = 2'-deoxy-2'-fluorouridine-3'-phosphate
  modified_base 10: mod_base = OTHER; note = 2'-deoxy-2'-fluorouridine-3'-phosphate
  modified_base 11: mod_base = OTHER; note = 2'-deoxy-2'-fluorocytidine-3'-phosphate
  modified_base 12: mod_base = OTHER; note = 2'-O-methyluridine-3'-phosphate
  modified_base 13: mod_base = OTHER; note = 2'-O-methyluridine-3'-phosphate
  modified_base 14: mod_base = OTHER; note = 2'-O-methylcytidine-3'-phosphate
  modified_base 15: mod_base = OTHER; note = 2'-O-methyluridine-3'-phosphate
  modified_base 16: mod_base = OTHER; note = 2'-O-methyluridine-3'-phosphate
  modified_base 17: mod_base = OTHER; note = 2'-O-methyluridine-3'-phosphate
  modified_base 18: mod_base = OTHER; note = 2'-O-methylguanosine-3'-phosphate
  modified_base 19: mod_base = OTHER; note = 2'-O-methyladenosine-3'-phosphate
  modified_base 20: mod_base = OTHER; note = 2'-O-methyladenosine-3'-phosphate
  modified_base 21: mod_base = OTHER; note = 2'-O-methyladenosine-3'-phosphate ((2S,4R)-1-[29-[[2-(acetylamino)-2-deoxy-beta-D-galactopyra nosyl]oxy]-14,14-bis[[3-[[3-[[5-[[2-(acetylamino)-2-deoxy-b eta-D-galactopyranosyl]oxy]-1-oxopentyl]amino]propyl]amino] -3-oxopropoxy]methyl]-1,12,19,25-tetraoxo-16-oxa-13,20,24-t riazanonacos-1-yl]-4-hydroxy-2-pyrrolidinyl)methyl ester
gcagctctttcttctttgaaa

SEQ ID NO: 252 - RNA, 21 nt, synthetic construct
  source 1..21: mol_type = other RNA
  modified_base 1: mod_base = OTHER; note = 2'-O-methylcytidine-3'-phosphorothioate
  modified_base 2: mod_base = OTHER; note = 2'-O-methyluridine-3'-phosphorothioate
  modified_base 3: mod_base = OTHER; note = 2'-O-methylcytidine-3'-phosphate
  modified_base 4: mod_base = OTHER; note = 2'-O-methyluridine-3'-phosphate
  modified_base 5: mod_base = OTHER; note = 2'-O-methyluridine-3'-phosphate
  modified_base 6: mod_base = OTHER; note = 2'-O-methyluridine-3'-phosphate
  modified_base 7: mod_base = OTHER; note = 2'-deoxy-2'-fluorocytidine-3'-phosphate
  modified_base 8: mod_base = OTHER; note = 2'-O-methyluridine-3'-phosphate
  modified_base 9: mod_base = OTHER; note = 2'-deoxy-2'-fluorouridine-3'-phosphate
  modified_base 10: mod_base = OTHER; note = 2'-deoxy-2'-fluorocytidine-3'-phosphate
  modified_base 11: mod_base = OTHER; note = 2'-deoxy-2'-fluorouridine-3'-phosphate
  modified_base 12: mod_base = OTHER; note = 2'-O-methyluridine-3'-phosphate
  modified_base 13: mod_base = OTHER; note = 2'-O-methyluridine-3'-phosphate
  modified_base 14: mod_base = OTHER; note = 2'-O-methylguanosine-3'-phosphate
  modified_base 15: mod_base = OTHER; note = 2'-O-methyladenosine-3'-phosphate
  modified_base 16: mod_base = OTHER; note = 2'-O-methyladenosine-3'-phosphate
  modified_base 17: mod_base = OTHER; note = 2'-O-methyluridine-3'-phosphate
  modified_base 18: mod_base = OTHER; note = 2'-O-methyluridine-3'-phosphate
  modified_base 19: mod_base = OTHER; note = 2'-O-methyluridine-3'-phosphate
  modified_base 20: mod_base = OTHER; note = 2'-O-methylcytidine-3'-phosphate
  modified_base 21: mod_base = OTHER; note = 2'-O-methyladenosine-3'-phosphate ((2S,4R)-1-[29-[[2-(acetylamino)-2-deoxy-beta-D-galactopyra nosyl]oxy]-14,14-bis[[3-[[3-[[5-[[2-(acetylamino)-2-deoxy-b eta-D-galactopyranosyl]oxy]-1-oxopentyl]amino]propyl]amino] -3-oxopropoxy]methyl]-1,12,19,25-tetraoxo-16-oxa-13,20,24-t riazanonacos-1-yl]-4-hydroxy-2-pyrrolidinyl)methyl ester
ctctttcttctttgaatttca

SEQ ID NO: 253 - RNA, 21 nt, synthetic construct
  source 1..21: mol_type = other RNA
  modified_base 1: mod_base = OTHER; note = 2'-O-methylcytidine-3'-phosphorothioate
  modified_base 2: mod_base = OTHER; note = 2'-O-methyluridine-3'-phosphorothioate
  modified_base 3: mod_base = OTHER; note = 2'-O-methyluridine-3'-phosphate
  modified_base 4: mod_base = OTHER; note = 2'-O-methyluridine-3'-phosphate
  modified_base 5: mod_base = OTHER; note = 2'-O-methylcytidine-3'-phosphate
  modified_base 6: mod_base = OTHER; note = 2'-O-methyluridine-3'-phosphate
  modified_base 7: mod_base = OTHER; note = 2'-deoxy-2'-fluorouridine-3'-phosphate
  modified_base 8: mod_base = OTHER; note = 2'-O-methylcytidine-3'-phosphate
  modified_base 9: mod_base = OTHER; note = 2'-deoxy-2'-fluorouridine-3'-phosphate
  modified_base 10: mod_base = OTHER; note = 2'-deoxy-2'-fluorouridine-3'-phosphate
  modified_base 11: mod_base = OTHER; note = 2'-deoxy-2'-fluorouridine-3'-phosphate
  modified_base 12: mod_base = OTHER; note = 2'-O-methylguanosine-3'-phosphate
  modified_base 13: mod_base = OTHER; note = 2'-O-methyladenosine-3'-phosphate
  modified_base 14: mod_base = OTHER; note = 2'-O-methyladenosine-3'-phosphate
  modified_base 15: mod_base = OTHER; note = 2'-O-methyluridine-3'-phosphate
  modified_base 16: mod_base = OTHER; note = 2'-O-methyluridine-3'-phosphate
  modified_base 17: mod_base = OTHER; note = 2'-O-methyluridine-3'-phosphate
  modified_base 18: mod_base = OTHER; note = 2'-O-methylcytidine-3'-phosphate
  modified_base 19: mod_base = OTHER; note = 2'-O-methylcytidine-3'-phosphate
  modified_base 20: mod_base = OTHER; note = 2'-O-methyluridine-3'-phosphate
  modified_base 21: mod_base = OTHER; note = 2'-O-methyladenosine-3'-phosphate ((2S,4R)-1-[29-[[2-(acetylamino)-2-deoxy-beta-D-galactopyra nosyl]oxy]-14,14-bis[[3-[[3-[[5-[[2-(acetylamino)-2-deoxy-b eta-D-galactopyranosyl]oxy]-1-oxopentyl]amino]propyl]amino] -3-oxopropoxy]methyl]-1,12,19,25-tetraoxo-16-oxa-13,20,24-t riazanonacos-1-yl]-4-hydroxy-2-pyrrolidinyl)methyl ester
ctttcttctttgaatttccta

SEQ ID NO: 254 - RNA, 21 nt, synthetic construct
  source 1..21: mol_type = other RNA
  modified_base 1: mod_base = OTHER; note = 2'-O-methylcytidine-3'-phosphorothioate
  modified_base 2: mod_base = OTHER; note = 2'-O-methyluridine-3'-phosphorothioate
  modified_base 3: mod_base = OTHER; note = 2'-O-methyluridine-3'-phosphate
  modified_base 4: mod_base = OTHER; note = 2'-O-methyluridine-3'-phosphate
  modified_base 5: mod_base = OTHER; note = 2'-O-methylguanosine-3'-phosphate
  modified_base 6: mod_base = OTHER; note = 2'-O-methyladenosine-3'-phosphate
  modified_base 7: mod_base = OTHER; note = 2'-deoxy-2'-fluoroadenosine-3'-phosphate
  modified_base 8: mod_base = OTHER; note = 2'-O-methyluridine-3'-phosphate
  modified_base 9: mod_base = OTHER; note = 2'-deoxy-2'-fluorouridine-3'-phosphate
  modified_base 10: mod_base = OTHER; note = 2'-deoxy-2'-fluorouridine-3'-phosphate
  modified_base 11: mod_base = OTHER; note = 2'-deoxy-2'-fluorocytidine-3'-phosphate
  modified_base 12: mod_base = OTHER; note = 2'-O-methylcytidine-3'-phosphate
  modified_base 13: mod_base = OTHER; note = 2'-O-methyluridine-3'-phosphate
  modified_base 14: mod_base = OTHER; note = 2'-O-methyladenosine-3'-phosphate
  modified_base 15: mod_base = OTHER; note = 2'-O-methyluridine-3'-phosphate
  modified_base 16: mod_base = OTHER; note = 2'-O-methylcytidine-3'-phosphate
  modified_base 17: mod_base = OTHER; note = 2'-O-methyluridine-3'-phosphate
  modified_base 18: mod_base = OTHER; note = 2'-O-methylguanosine-3'-phosphate
  modified_base 19: mod_base = OTHER; note = 2'-O-methyluridine-3'-phosphate
  modified_base 20: mod_base = OTHER; note = 2'-O-methyladenosine-3'-phosphate
  modified_base 21: mod_base = OTHER; note = 2'-O-methyladenosine-3'-phosphate ((2S,4R)-1-[29-[[2-(acetylamino)-2-deoxy-beta-D-galactopyra nosyl]oxy]-14,14-bis[[3-[[3-[[5-[[2-(acetylamino)-2-deoxy-b eta-D-galactopyranosyl]oxy]-1-oxopentyl]amino]propyl]amino] -3-oxopropoxy]methyl]-1,12,19,25-tetraoxo-16-oxa-13,20,24-t riazanonacos-1-yl]-4-hydroxy-2-pyrrolidinyl)methyl ester
ctttgaatttcctatctgtaa

SEQ ID NO: 255 - RNA, 21 nt, synthetic construct
  source 1..21: mol_type = other RNA
  modified_base 1: mod_base = OTHER; note = 2'-O-methyluridine-3'-phosphorothioate
  modified_base 2: mod_base = OTHER; note = 2'-O-methyluridine-3'-phosphorothioate
  modified_base 3: mod_base = OTHER; note = 2'-O-methyluridine-3'-phosphate
  modified_base 4: mod_base = OTHER; note = 2'-O-methylguanosine-3'-phosphate
  modified_base 5: mod_base = OTHER; note = 2'-O-methyladenosine-3'-phosphate
  modified_base 6: mod_base = OTHER; note = 2'-O-methyladenosine-3'-phosphate
  modified_base 7: mod_base = OTHER; note = 2'-deoxy-2'-fluorouridine-3'-phosphate
  modified_base 8: mod_base = OTHER; note = 2'-O-methyluridine-3'-phosphate
  modified_base 9: mod_base = OTHER; note = 2'-deoxy-2'-fluorouridine-3'-phosphate
  modified_base 10: mod_base = OTHER; note = 2'-deoxy-2'-fluorocytidine-3'-phosphate
  modified_base 11: mod_base = OTHER; note = 2'-deoxy-2'-fluorocytidine-3'-phosphate
  modified_base 12: mod_base = OTHER; note = 2'-O-methyluridine-3'-phosphate
  modified_base 13: mod_base = OTHER; note = 2'-O-methyladenosine-3'-phosphate
  modified_base 14: mod_base = OTHER; note = 2'-O-methyluridine-3'-phosphate
  modified_base 15: mod_base = OTHER; note = 2'-O-methylcytidine-3'-phosphate
  modified_base 16: mod_base = OTHER; note = 2'-O-methyluridine-3'-phosphate
  modified_base 17: mod_base = OTHER; note = 2'-O-methylguanosine-3'-phosphate
  modified_base 18: mod_base = OTHER; note = 2'-O-methyluridine-3'-phosphate
  modified_base 19: mod_base = OTHER; note = 2'-O-methyladenosine-3'-phosphate
  modified_base 20: mod_base = OTHER; note = 2'-O-methyluridine-3'-phosphate
  modified_base 21: mod_base = OTHER; note = 2'-O-methyladenosine-3'-phosphate ((2S,4R)-1-[29-[[2-(acetylamino)-2-deoxy-beta-D-galactopyra nosyl]oxy]-14,14-bis[[3-[[3-[[5-[[2-(acetylamino)-2-deoxy-b eta-D-galactopyranosyl]oxy]-1-oxopentyl]amino]propyl]amino] -3-oxopropoxy]methyl]-1,12,19,25-tetraoxo-16-oxa-13,20,24-t riazanonacos-1-yl]-4-hydroxy-2-pyrrolidinyl)methyl ester
tttgaatttcctatctgtata

SEQ ID NO: 256 - RNA, 21 nt, synthetic construct
  source 1..21: mol_type = other RNA
  modified_base 1: mod_base = OTHER; note = 2'-O-methyluridine-3'-phosphorothioate
  modified_base 2: mod_base = OTHER; note = 2'-O-methylguanosine-3'-phosphorothioate
  modified_base 3: mod_base = OTHER; note = 2'-O-methyladenosine-3'-phosphate
  modified_base 4: mod_base = OTHER; note = 2'-O-methyladenosine-3'-phosphate
  modified_base 5: mod_base = OTHER; note = 2'-O-methyluridine-3'-phosphate
  modified_base 6: mod_base = OTHER; note = 2'-O-methyluridine-3'-phosphate
  modified_base 7: mod_base = OTHER; note = 2'-deoxy-2'-fluorouridine-3'-phosphate
  modified_base 8: mod_base = OTHER; note = 2'-O-methylcytidine-3'-phosphate
  modified_base 9: mod_base = OTHER; note = 2'-deoxy-2'-fluorocytidine-3'-phosphate
  modified_base 10: mod_base = OTHER; note = 2'-deoxy-2'-fluorouridine-3'-phosphate
  modified_base 11: mod_base = OTHER; note = 2'-deoxy-2'-fluoroadenosine-3'-phosphate
  modified_base 12: mod_base = OTHER; note = 2'-O-methyluridine-3'-phosphate
  modified_base 13: mod_base = OTHER; note = 2'-O-methylcytidine-3'-phosphate
  modified_base 14: mod_base = OTHER; note = 2'-O-methyluridine-3'-phosphate
  modified_base 15: mod_base = OTHER; note = 2'-O-methylguanosine-3'-phosphate
  modified_base 16: mod_base = OTHER; note = 2'-O-methyluridine-3'-phosphate
  modified_base 17: mod_base = OTHER; note = 2'-O-methyladenosine-3'-phosphate
  modified_base 18: mod_base = OTHER; note = 2'-O-methyluridine-3'-phosphate
  modified_base 19: mod_base = OTHER; note = 2'-O-methylguanosine-3'-phosphate
  modified_base 20: mod_base = OTHER; note = 2'-O-methyluridine-3'-phosphate
  modified_base 21: mod_base = OTHER; note = 2'-O-methyladenosine-3'-phosphate ((2S,4R)-1-[29-[[2-(acetylamino)-2-deoxy-beta-D-galactopyra nosyl]oxy]-14,14-bis[[3-[[3-[[5-[[2-(acetylamino)-2-deoxy-b eta-D-galactopyranosyl]oxy]-1-oxopentyl]amino]propyl]amino] -3-oxopropoxy]methyl]-1,12,19,25-tetraoxo-16-oxa-13,20,24-t riazanonacos-1-yl]-4-hydroxy-2-pyrrolidinyl)methyl ester
tgaatttcctatctgtatgta

SEQ ID NO: 257 - RNA, 21 nt, synthetic construct
  source 1..21: mol_type = other RNA
  modified_base 1: mod_base = OTHER; note = 2'-O-methyladenosine-3'-phosphorothioate
  modified_base 2: mod_base = OTHER; note = 2'-O-methyladenosine-3'-phosphorothioate
  modified_base 3: mod_base = OTHER; note = 2'-O-methyluridine-3'-phosphate
  modified_base 4: mod_base = OTHER; note = 2'-O-methyluridine-3'-phosphate
  modified_base 5: mod_base = OTHER; note = 2'-O-methyluridine-3'-phosphate
  modified_base 6: mod_base = OTHER; note = 2'-O-methylcytidine-3'-phosphate
  modified_base 7: mod_base = OTHER; note = 2'-deoxy-2'-fluorocytidine-3'-phosphate
  modified_base 8: mod_base = OTHER; note = 2'-O-methyluridine-3'-phosphate
  modified_base 9: mod_base = OTHER; note = 2'-deoxy-2'-fluoroadenosine-3'-phosphate
  modified_base 10: mod_base = OTHER; note = 2'-deoxy-2'-fluorouridine-3'-phosphate
  modified_base 11: mod_base = OTHER; note = 2'-deoxy-2'-fluorocytidine-3'-phosphate
  modified_base 12: mod_base = OTHER; note = 2'-O-methyluridine-3'-phosphate
  modified_base 13: mod_base = OTHER; note = 2'-O-methylguanosine-3'-phosphate
  modified_base 14: mod_base = OTHER; note = 2'-O-methyluridine-3'-phosphate
  modified_base 15: mod_base = OTHER; note = 2'-O-methyladenosine-3'-phosphate
  modified_base 16: mod_base = OTHER; note = 2'-O-methyluridine-3'-phosphate
  modified_base 17: mod_base = OTHER; note = 2'-O-methylguanosine-3'-phosphate
  modified_base 18: mod_base = OTHER; note = 2'-O-methyluridine-3'-phosphate
  modified_base 19: mod_base = OTHER; note = 2'-O-methylcytidine-3'-phosphate
  modified_base 20: mod_base = OTHER; note = 2'-O-methyluridine-3'-phosphate
  modified_base 21: mod_base = OTHER; note = 2'-O-methyladenosine-3'-phosphate ((2S,4R)-1-[29-[[2-(acetylamino)-2-deoxy-beta-D-galactopyra nosyl]oxy]-14,14-bis[[3-[[3-[[5-[[2-(acetylamino)-2-deoxy-b eta-D-galactopyranosyl]oxy]-1-oxopentyl]amino]propyl]amino] -3-oxopropoxy]methyl]-1,12,19,25-tetraoxo-16-oxa-13,20,24-t riazanonacos-1-yl]-4-hydroxy-2-pyrrolidinyl)methyl ester
aatttcctatctgtatgtcta

SEQ ID NO: 258 - RNA, 21 nt, synthetic construct
  source 1..21: mol_type = other RNA
  modified_base 1: mod_base = OTHER; note = 2'-O-methyladenosine-3'-phosphorothioate
  modified_base 2: mod_base = OTHER; note = 2'-O-methyluridine-3'-phosphorothioate
  modified_base 3: mod_base = OTHER; note = 2'-O-methylcytidine-3'-phosphate
  modified_base 4: mod_base = OTHER; note = 2'-O-methyluridine-3'-phosphate
  modified_base 5: mod_base = OTHER; note = 2'-O-methylguanosine-3'-phosphate
  modified_base 6: mod_base = OTHER; note = 2'-O-methyluridine-3'-phosphate
  modified_base 7: mod_base = OTHER; note = 2'-deoxy-2'-fluoroadenosine-3'-phosphate
  modified_base 8: mod_base = OTHER; note = 2'-O-methyluridine-3'-phosphate
  modified_base 9: mod_base = OTHER; note = 2'-deoxy-2'-fluoroguanosine-3'-phosphate
  modified_base 10: mod_base = OTHER; note = 2'-deoxy-2'-fluorouridine-3'-phosphate
  modified_base 11: mod_base = OTHER; note = 2'-deoxy-2'-fluorocytidine-3'-phosphate
  modified_base 12: mod_base = OTHER; note = 2'-O-methyluridine-3'-phosphate
  modified_base 13: mod_base = OTHER; note = 2'-O-methylguanosine-3'-phosphate
  modified_base 14: mod_base = OTHER; note = 2'-O-methylcytidine-3'-phosphate
  modified_base 15: mod_base = OTHER; note = 2'-O-methylcytidine-3'-phosphate
  modified_base 16: mod_base = OTHER; note = 2'-O-methyluridine-3'-phosphate
  modified_base 17: mod_base = OTHER; note = 2'-O-methyladenosine-3'-phosphate
  modified_base 18: mod_base = OTHER; note = 2'-O-methyladenosine-3'-phosphate
  modified_base 19: mod_base = OTHER; note = 2'-O-methyluridine-3'-phosphate
  modified_base 20: mod_base = OTHER; note = 2'-O-methyluridine-3'-phosphate
  modified_base 21: mod_base = OTHER; note = 2'-O-methyladenosine-3'-phosphate ((2S,4R)-1-[29-[[2-(acetylamino)-2-deoxy-beta-D-galactopyra nosyl]oxy]-14,14-bis[[3-[[3-[[5-[[2-(acetylamino)-2-deoxy-b eta-D-galactopyranosyl]oxy]-1-oxopentyl]amino]propyl]amino] -3-oxopropoxy]methyl]-1,12,19,25-tetraoxo-16-oxa-13,20,24-t riazanonacos-1-yl]-4-hydroxy-2-pyrrolidinyl)methyl ester
atctgtatgtctgcctaatta

SEQ ID NO: 259 - RNA, 21 nt, synthetic construct
  source 1..21: mol_type = other RNA
  modified_base 1: mod_base = OTHER; note = 2'-O-methyluridine-3'-phosphorothioate
  modified_base 2: mod_base = OTHER; note = 2'-O-methylguanosine-3'-phosphorothioate
  modified_base 3: mod_base = OTHER; note = 2'-O-methyluridine-3'-phosphate
  modified_base 4: mod_base = OTHER; note = 2'-O-methyladenosine-3'-phosphate
  modified_base 5: mod_base = OTHER; note = 2'-O-methyluridine-3'-phosphate
  modified_base 6: mod_base = OTHER; note = 2'-O-methylguanosine-3'-phosphate
  modified_base 7: mod_base = OTHER; note = 2'-deoxy-2'-fluorouridine-3'-phosphate
  modified_base 8: mod_base = OTHER; note = 2'-O-methylcytidine-3'-phosphate
  modified_base 9: mod_base = OTHER; note = 2'-deoxy-2'-fluorouridine-3'-phosphate
  modified_base 10: mod_base = OTHER; note = 2'-deoxy-2'-fluoroguanosine-3'-phosphate
  modified_base 11: mod_base = OTHER; note = 2'-deoxy-2'-fluorocytidine-3'-phosphate
  modified_base 12: mod_base = OTHER; note = 2'-O-methylcytidine-3'-phosphate
  modified_base 13: mod_base = OTHER; note = 2'-O-methyluridine-3'-phosphate
  modified_base 14: mod_base = OTHER; note = 2'-O-methyladenosine-3'-phosphate
  modified_base 15: mod_base = OTHER; note = 2'-O-methyladenosine-3'-phosphate
  modified_base 16: mod_base = OTHER; note = 2'-O-methyluridine-3'-phosphate
  modified_base 17: mod_base = OTHER; note = 2'-O-methyluridine-3'-phosphate
  modified_base 18: mod_base = OTHER; note = 2'-O-methyladenosine-3'-phosphate
  modified_base 19: mod_base = OTHER; note = 2'-O-methyladenosine-3'-phosphate
  modified_base 20: mod_base = OTHER; note = 2'-O-methyladenosine-3'-phosphate
  modified_base 21: mod_base = OTHER; note = 2'-O-methyladenosine-3'-phosphate ((2S,4R)-1-[29-[[2-(acetylamino)-2-deoxy-beta-D-galactopyra nosyl]oxy]-14,14-bis[[3-[[3-[[5-[[2-(acetylamino)-2-deoxy-b eta-D-galactopyranosyl]oxy]-1-oxopentyl]amino]propyl]amino] -3-oxopropoxy]methyl]-1,12,19,25-tetraoxo-16-oxa-13,20,24-t riazanonacos-1-yl]-4-hydroxy-2-pyrrolidinyl)methyl ester
tgtatgtctgcctaattaaaa

SEQ ID NO: 260 - RNA, 21 nt, synthetic construct
  source 1..21: mol_type = other RNA
  modified_base 1: mod_base = OTHER; note = 2'-O-methylguanosine-3'-phosphorothioate
  modified_base 2: mod_base = OTHER; note = 2'-O-methyluridine-3'-phosphorothioate
  modified_base 3: mod_base = OTHER; note = 2'-O-methyladenosine-3'-phosphate
  modified_base 4: mod_base = OTHER; note = 2'-O-methyluridine-3'-phosphate
  modified_base 5: mod_base = OTHER; note = 2'-O-methylguanosine-3'-phosphate
  modified_base 6: mod_base = OTHER; note = 2'-O-methyluridine-3'-phosphate
  modified_base 7: mod_base = OTHER; note = 2'-deoxy-2'-fluorocytidine-3'-phosphate
  modified_base 8: mod_base = OTHER; note = 2'-O-methyluridine-3'-phosphate
  modified_base 9: mod_base = OTHER; note = 2'-deoxy-2'-fluoroguanosine-3'-phosphate
  modified_base 10: mod_base = OTHER; note = 2'-deoxy-2'-fluorocytidine-3'-phosphate
  modified_base 11: mod_base = OTHER; note = 2'-deoxy-2'-fluorocytidine-3'-phosphate
  modified_base 12: mod_base = OTHER; note = 2'-O-methyluridine-3'-phosphate
  modified_base 13: mod_base = OTHER; note = 2'-O-methyladenosine-3'-phosphate
  modified_base 14: mod_base = OTHER; note = 2'-O-methyladenosine-3'-phosphate
  modified_base 15: mod_base = OTHER; note = 2'-O-methyluridine-3'-phosphate
  modified_base 16: mod_base = OTHER; note = 2'-O-methyluridine-3'-phosphate
  modified_base 17: mod_base = OTHER; note = 2'-O-methyladenosine-3'-phosphate
  modified_base 18: mod_base = OTHER; note = 2'-O-methyladenosine-3'-phosphate
  modified_base 19: mod_base = OTHER; note = 2'-O-methyladenosine-3'-phosphate
  modified_base 20: mod_base = OTHER; note = 2'-O-methyladenosine-3'-phosphate
  modified_base 21: mod_base = OTHER; note = 2'-O-methyladenosine-3'-phosphate ((2S,4R)-1-[29-[[2-(acetylamino)-2-deoxy-beta-D-galactopyra nosyl]oxy]-14,14-bis[[3-[[3-[[5-[[2-(acetylamino)-2-deoxy-b eta-D-galactopyranosyl]oxy]-1-oxopentyl]amino]propyl]amino] -3-oxopropoxy]methyl]-1,12,19,25-tetraoxo-16-oxa-13,20,24-t riazanonacos-1-yl]-4-hydroxy-2-pyrrolidinyl)methyl ester
gtatgtctgcctaattaaaaa

SEQ ID NO: 261 - RNA, 21 nt, synthetic construct
  source 1..21: mol_type = other RNA
  modified_base 1: mod_base = OTHER; note = 2'-O-methyluridine-3'-phosphorothioate
  modified_base 2: mod_base = OTHER; note = 2'-O-methyladenosine-3'-phosphorothioate
  modified_base 3: mod_base = OTHER; note = 2'-O-methyluridine-3'-phosphate
  modified_base 4: mod_base = OTHER; note = 2'-O-methylguanosine-3'-phosphate
  modified_base 5: mod_base = OTHER; note = 2'-O-methyluridine-3'-phosphate
  modified_base 6: mod_base = OTHER; note = 2'-O-methylcytidine-3'-phosphate
  modified_base 7: mod_base = OTHER; note = 2'-deoxy-2'-fluorouridine-3'-phosphate
  modified_base 8: mod_base = OTHER; note = 2'-O-methylguanosine-3'-phosphate
  modified_base 9: mod_base = OTHER; note = 2'-deoxy-2'-fluorocytidine-3'-phosphate
  modified_base 10: mod_base = OTHER; note = 2'-deoxy-2'-fluorocytidine-3'-phosphate
  modified_base 11: mod_base = OTHER; note = 2'-deoxy-2'-fluorouridine-3'-phosphate
  modified_base 12: mod_base = OTHER; note = 2'-O-methyladenosine-3'-phosphate
  modified_base 13: mod_base = OTHER; note = 2'-O-methyladenosine-3'-phosphate
  modified_base 14: mod_base = OTHER; note = 2'-O-methyluridine-3'-phosphate
  modified_base 15: mod_base = OTHER; note = 2'-O-methyluridine-3'-phosphate
  modified_base 16: mod_base = OTHER; note = 2'-O-methyladenosine-3'-phosphate
  modified_base 17: mod_base = OTHER; note = 2'-O-methyladenosine-3'-phosphate
  modified_base 18: mod_base = OTHER; note = 2'-O-methyladenosine-3'-phosphate
  modified_base 19: mod_base = OTHER; note = 2'-O-methyladenosine-3'-phosphate
  modified_base 20: mod_base = OTHER; note = 2'-O-methyladenosine-3'-phosphate
  modified_base 21: mod_base = OTHER; note = 2'-O-methyladenosine-3'-phosphate ((2S,4R)-1-[29-[[2-(acetylamino)-2-deoxy-beta-D-galactopyra nosyl]oxy]-14,14-bis[[3-[[3-[[5-[[2-(acetylamino)-2-deoxy-b eta-D-galactopyranosyl]oxy]-1-oxopentyl]amino]propyl]amino] -3-oxopropoxy]methyl]-1,12,19,25-tetraoxo-16-oxa-13,20,24-t riazanonacos-1-yl]-4-hydroxy-2-pyrrolidinyl)methyl ester
tatgtctgcctaattaaaaaa

SEQ ID NO: 262 - RNA, 21 nt, synthetic construct
  source 1..21: mol_type = other RNA
  modified_base 1: mod_base = OTHER; note = 2'-O-methyluridine-3'-phosphorothioate
  modified_base 2: mod_base = OTHER; note = 2'-O-methylguanosine-3'-phosphorothioate
  modified_base 3: mod_base = OTHER; note = 2'-O-methyluridine-3'-phosphate
  modified_base 4: mod_base = OTHER; note = 2'-O-methylcytidine-3'-phosphate
  modified_base 5: mod_base = OTHER; note = 2'-O-methyluridine-3'-phosphate
  modified_base 6: mod_base = OTHER; note = 2'-O-methylguanosine-3'-phosphate
  modified_base 7: mod_base = OTHER; note = 2'-deoxy-2'-fluorocytidine-3'-phosphate
  modified_base 8: mod_base = OTHER; note = 2'-O-methylcytidine-3'-phosphate
  modified_base 9: mod_base = OTHER; note = 2'-deoxy-2'-fluorouridine-3'-phosphate
  modified_base 10: mod_base = OTHER; note = 2'-deoxy-2'-fluoroadenosine-3'-phosphate
  modified_base 11: mod_base = OTHER; note = 2'-deoxy-2'-fluoroadenosine-3'-phosphate
  modified_base 12: mod_base = OTHER; note = 2'-O-methyluridine-3'-phosphate
  modified_base 13: mod_base = OTHER; note = 2'-O-methyluridine-3'-phosphate
  modified_base 14: mod_base = OTHER; note = 2'-O-methyladenosine-3'-phosphate
  modified_base 15: mod_base = OTHER; note = 2'-O-methyladenosine-3'-phosphate
  modified_base 16: mod_base = OTHER; note = 2'-O-methyladenosine-3'-phosphate
  modified_base 17: mod_base = OTHER; note = 2'-O-methyladenosine-3'-phosphate
  modified_base 18: mod_base = OTHER; note = 2'-O-methyladenosine-3'-phosphate
  modified_base 19: mod_base = OTHER; note = 2'-O-methyladenosine-3'-phosphate
  modified_base 20: mod_base = OTHER; note = 2'-O-methyladenosine-3'-phosphate
  modified_base 21: mod_base = OTHER; note = 2'-O-methyladenosine-3'-phosphate ((2S,4R)-1-[29-[[2-(acetylamino)-2-deoxy-beta-D-galactopyra nosyl]oxy]-14,14-bis[[3-[[3-[[5-[[2-(acetylamino)-2-deoxy-b eta-D-galactopyranosyl]oxy]-1-oxopentyl]amino]propyl]amino] -3-oxopropoxy]methyl]-1,12,19,25-tetraoxo-16-oxa-13,20,24-t riazanonacos-1-yl]-4-hydroxy-2-pyrrolidinyl)methyl ester
tgtctgcctaattaaaaaaaa

SEQ ID NO: 263 - RNA, 21 nt, synthetic construct
  source 1..21: mol_type = other RNA
  modified_base 1: mod_base = OTHER; note = 2'-O-methyluridine-3'-phosphorothioate
  modified_base 2: mod_base = OTHER; note = 2'-O-methyluridine-3'-phosphorothioate
  modified_base 3: mod_base = OTHER; note = 2'-O-methylguanosine-3'-phosphate
  modified_base 4: mod_base = OTHER; note = 2'-O-methyluridine-3'-phosphate
  modified_base 5: mod_base = OTHER; note = 2'-O-methyladenosine-3'-phosphate
  modified_base 6: mod_base = OTHER; note = 2'-O-methyluridine-3'-phosphate
  modified_base 7: mod_base = OTHER; note = 2'-deoxy-2'-fluorouridine-3'-phosphate
  modified_base 8: mod_base = OTHER; note = 2'-O-methyladenosine-3'-phosphate
  modified_base 9: mod_base = OTHER; note = 2'-deoxy-2'-fluorouridine-3'-phosphate
  modified_base 10: mod_base = OTHER; note = 2'-deoxy-2'-fluoroguanosine-3'-phosphate
  modified_base 11: mod_base = OTHER; note = 2'-deoxy-2'-fluorocytidine-3'-phosphate
  modified_base 12: mod_base = OTHER; note = 2'-O-methyluridine-3'-phosphate
  modified_base 13: mod_base = OTHER; note = 2'-O-methyladenosine-3'-phosphate
  modified_base 14: mod_base = OTHER; note = 2'-O-methylcytidine-3'-phosphate
  modified_base 15: mod_base = OTHER; note = 2'-O-methylcytidine-3'-phosphate
  modified_base 16: mod_base = OTHER; note = 2'-O-methyluridine-3'-phosphate
  modified_base 17: mod_base = OTHER; note = 2'-O-methylguanosine-3'-phosphate
  modified_base 18: mod_base = OTHER; note = 2'-O-methylcytidine-3'-phosphate
  modified_base 19: mod_base = OTHER; note = 2'-O-methyladenosine-3'-phosphate
  modified_base 20: mod_base = OTHER; note = 2'-O-methyladenosine-3'-phosphate
  modified_base 21: mod_base = OTHER; note = 2'-O-methyladenosine-3'-phosphate ((2S,4R)-1-[29-[[2-(acetylamino)-2-deoxy-beta-D-galactopyra nosyl]oxy]-14,14-bis[[3-[[3-[[5-[[2-(acetylamino)-2-deoxy-b eta-D-galactopyranosyl]oxy]-1-oxopentyl]amino]propyl]amino] -3-oxopropoxy]methyl]-1,12,19,25-tetraoxo-16-oxa-13,20,24-t riazanonacos-1-yl]-4-hydroxy-2-pyrrolidinyl)methyl ester
ttgtattatgctacctgcaaa

SEQ ID NO: 264 - RNA, 21 nt, synthetic construct
  source 1..21: mol_type = other RNA
  modified_base 1: mod_base = OTHER; note = 2'-O-methyluridine-3'-phosphorothioate
  modified_base 2: mod_base = OTHER; note = 2'-O-methyluridine-3'-phosphorothioate
  modified_base 3: mod_base = OTHER; note = 2'-O-methyladenosine-3'-phosphate
  modified_base 4: mod_base = OTHER; note = 2'-O-methyluridine-3'-phosphate
  modified_base 5: mod_base = OTHER; note = 2'-O-methylguanosine-3'-phosphate
  modified_base 6: mod_base = OTHER; note = 2'-O-methylcytidine-3'-phosphate
  modified_base 7: mod_base = OTHER; note = 2'-deoxy-2'-fluorouridine-3'-phosphate
  modified_base 8: mod_base = OTHER; note = 2'-O-methyladenosine-3'-phosphate
  modified_base 9: mod_base = OTHER; note = 2'-deoxy-2'-fluorocytidine-3'-phosphate
  modified_base 10: mod_base = OTHER; note = 2'-deoxy-2'-fluorocytidine-3'-phosphate
  modified_base 11: mod_base = OTHER; note = 2'-deoxy-2'-fluorouridine-3'-phosphate
  modified_base 12: mod_base = OTHER; note = 2'-O-methylguanosine-3'-phosphate
  modified_base 13: mod_base = OTHER; note = 2'-O-methylcytidine-3'-phosphate
  modified_base 14: mod_base = OTHER; note = 2'-O-methyladenosine-3'-phosphate
  modified_base 15: mod_base = OTHER; note = 2'-O-methyladenosine-3'-phosphate
  modified_base 16: mod_base = OTHER; note = 2'-O-methyladenosine-3'-phosphate
  modified_base 17: mod_base = OTHER; note = 2'-O-methyladenosine-3'-phosphate
  modified_base 18: mod_base = OTHER; note = 2'-O-methyladenosine-3'-phosphate
  modified_base 19: mod_base = OTHER; note = 2'-O-methyladenosine-3'-phosphate
  modified_base 20: mod_base = OTHER; note = 2'-O-methyladenosine-3'-phosphate
  modified_base 21: mod_base = OTHER; note = 2'-O-methyladenosine-3'-phosphate ((2S,4R)-1-[29-[[2-(acetylamino)-2-deoxy-beta-D-galactopyra nosyl]oxy]-14,14-bis[[3-[[3-[[5-[[2-(acetylamino)-2-deoxy-b eta-D-galactopyranosyl]oxy]-1-oxopentyl]amino]propyl]amino] -3-oxopropoxy]methyl]-1,12,19,25-tetraoxo-16-oxa-13,20,24-t riazanonacos-1-yl]-4-hydroxy-2-pyrrolidinyl)methyl ester
ttatgctacctgcaaaaaaaa

SEQ ID NO: 265 - RNA, 23 nt, synthetic construct
  source 1..23: mol_type = other RNA
  modified_base 1: mod_base = OTHER; note = 2'-O-methyluridine-3'-phosphorothioate 5'-(E)-Vinylphosphonate
  modified_base 2: mod_base = OTHER; note = 2'-deoxy-2'-fluoroguanosine-3'-phosphorothioate
  modified_base 3: mod_base = OTHER; note = 2'-O-methylcytidine-3'-phosphate
  modified_base 4: mod_base = OTHER; note = 2'-O-methyluridine-3'-phosphate
  modified_base 5: mod_base = OTHER; note = 2'-O-methylguanosine-3'-phosphate
  modified_base 6: mod_base = OTHER; note = 2'-deoxy-2'-fluorouridine-3'-phosphate
  modified_base 7: mod_base = OTHER; note = 2'-O-methyluridine-3'-phosphate
  modified_base 8: mod_base = OTHER; note = 2'-deoxy-2'-fluoroadenosine-3'-phosphate
  modified_base 9: mod_base = OTHER; note = 2'-deoxy-2'-fluorouridine-3'-phosphate
  modified_base 10: mod_base = OTHER; note = 2'-O-methyladenosine-3'-phosphate
  modified_base 11: mod_base = OTHER; note = 2'-O-methylguanosine-3'-phosphate
  modified_base 12: mod_base = OTHER; note = 2'-O-methylcytidine-3'-phosphate
  modified_base 13: mod_base = OTHER; note = 2'-O-methyladenosine-3'-phosphate
  modified_base 14: mod_base = OTHER; note = 2'-deoxy-2'-fluoroguanosine-3'-phosphate
  modified_base 15: mod_base = OTHER; note = 2'-O-methyladenosine-3'-phosphate
  modified_base 16: mod_base = OTHER; note = 2'-deoxy-2'-fluoroadenosine-3'-phosphate
  modified_base 17: mod_base = OTHER; note = 2'-O-methylguanosine-3'-phosphate
  modified_base 18: mod_base = OTHER; note = 2'-O-methylcytidine-3'-phosphate
  modified_base 19: mod_base = OTHER; note = 2'-O-methyladenosine-3'-phosphate
  modified_base 20: mod_base = OTHER; note = 2'-O-methylguanosine-3'-phosphate
  modified_base 21: mod_base = OTHER; note = 2'-O-methyluridine-3'-phosphorothioate
  modified_base 22: mod_base = OTHER; note = 2'-O-methylguanosine-3'-phosphorothioate
  modified_base 23: mod_base = OTHER; note = 2'-O-methyladenosine
tgctgttatagcagaagcagtga

SEQ ID NO: 266 - RNA, 23 nt, synthetic construct
  source 1..23: mol_type = other RNA
  modified_base 1: mod_base = OTHER; note = 2'-O-methyluridine-3'-phosphorothioate 5'-(E)-Vinylphosphonate
  modified_base 2: mod_base = OTHER; note = 2'-deoxy-2'-fluoroadenosine-3'-phosphorothioate
  modified_base 3: mod_base = OTHER; note = 2'-O-methyladenosine-3'-phosphate
  modified_base 4: mod_base = OTHER; note = 2'-O-methyladenosine-3'-phosphate
  modified_base 5: mod_base = OTHER; note = 2'-O-methylguanosine-3'-phosphate
  modified_base 6: mod_base = OTHER; note = 2'-deoxy-2'-fluorocytidine-3'-phosphate
  modified_base 7: mod_base = OTHER; note = 2'-O-methyladenosine-3'-phosphate
  modified_base 8: mod_base = OTHER; note = 2'-deoxy-2'-fluoroguanosine-3'-phosphate
  modified_base 9: mod_base = OTHER; note = 2'-deoxy-2'-fluorocytidine-3'-phosphate
  modified_base 10: mod_base = OTHER; note = 2'-O-methylguanosine-3'-phosphate
  modified_base 11: mod_base = OTHER; note = 2'-O-methylguanosine-3'-phosphate
  modified_base 12: mod_base = OTHER; note = 2'-O-methylcytidine-3'-phosphate
  modified_base 13: mod_base = OTHER; note = 2'-O-methyluridine-3'-phosphate
  modified_base 14: mod_base = OTHER; note = 2'-deoxy-2'-fluorouridine-3'-phosphate
  modified_base 15: mod_base = OTHER; note = 2'-O-methylguanosine-3'-phosphate
  modified_base 16: mod_base = OTHER; note = 2'-deoxy-2'-fluorouridine-3'-phosphate
  modified_base 17: mod_base = OTHER; note = 2'-O-methyluridine-3'-phosphate
  modified_base 18: mod_base = OTHER; note = 2'-O-methylcytidine-3'-phosphate
  modified_base 19: mod_base = OTHER; note = 2'-O-methyladenosine-3'-phosphate
  modified_base 20: mod_base = OTHER; note = 2'-O-methyluridine-3'-phosphate
  modified_base 21: mod_base = OTHER; note = 2'-O-methyladenosine-3'-phosphorothioate
  modified_base 22: mod_base = OTHER; note = 2'-O-methyluridine-3'-phosphorothioate
  modified_base 23: mod_base = OTHER; note = 2'-O-methyluridine
taaagcagcggcttgttcatatt

SEQ ID NO: 267 - RNA, 23 nt, synthetic construct
  source 1..23: mol_type = other RNA
  modified_base 1: mod_base = OTHER; note = 2'-O-methyluridine-3'-phosphorothioate 5'-(E)-Vinylphosphonate
  modified_base 2: mod_base = OTHER; note = 2'-deoxy-2'-fluoroadenosine-3'-phosphorothioate
  modified_base 3: mod_base = OTHER; note = 2'-O-methyluridine-3'-phosphate
  modified_base 4: mod_base = OTHER; note = 2'-O-methyladenosine-3'-phosphate
  modified_base 5: mod_base = OTHER; note = 2'-O-methylcytidine-3'-phosphate
  modified_base 6: mod_base = OTHER; note = 2'-deoxy-2'-fluoroadenosine-3'-phosphate
  modified_base 7: mod_base = OTHER; note = 2'-O-methyladenosine-3'-phosphate
  modified_base 8: mod_base = OTHER; note = 2'-deoxy-2'-fluoroadenosine-3'-phosphate
  modified_base 9: mod_base = OTHER; note = 2'-deoxy-2'-fluorocytidine-3'-phosphate
  modified_base 10: mod_base = OTHER; note = 2'-O-methyladenosine-3'-phosphate
  modified_base 11: mod_base = OTHER; note = 2'-O-methylcytidine-3'-phosphate
  modified_base 12: mod_base = OTHER; note = 2'-O-methylcytidine-3'-phosphate
  modified_base 13: mod_base = OTHER; note = 2'-O-methyluridine-3'-phosphate
  modified_base 14: mod_base = OTHER; note = 2'-deoxy-2'-fluorouridine-3'-phosphate
  modified_base 15: mod_base = OTHER; note = 2'-O-methylcytidine-3'-phosphate
  modified_base 16: mod_base = OTHER; note = 2'-deoxy-2'-fluorocytidine-3'-phosphate
  modified_base 17: mod_base = OTHER; note = 2'-O-methylcytidine-3'-phosphate
  modified_base 18: mod_base = OTHER; note = 2'-O-methyladenosine-3'-phosphate
  modified_base 19: mod_base = OTHER; note = 2'-O-methylcytidine-3'-phosphate
  modified_base 20: mod_base = OTHER; note = 2'-O-methyluridine-3'-phosphate
  modified_base 21: mod_base = OTHER; note = 2'-O-methylguanosine-3'-phosphorothioate
  modified_base 22: mod_base = OTHER; note = 2'-O-methyladenosine-3'-phosphorothioate
  modified_base 23: mod_base = OTHER; note = 2'-O-methylguanosine
tatacaaacaccttcccactgag

SEQ ID NO: 268 - RNA, 23 nt, synthetic construct
  source 1..23: mol_type = other RNA
  modified_base 1: mod_base = OTHER; note = 2'-O-methyluridine-3'-phosphorothioate 5'-(E)-Vinylphosphonate
  modified_base 2: mod_base = OTHER; note = 2'-deoxy-2'-fluorouridine-3'-phosphorothioate
  modified_base 3: mod_base = OTHER; note = 2'-O-methylcytidine-3'-phosphate
  modified_base 4: mod_base = OTHER; note = 2'-O-methyluridine-3'-phosphate
  modified_base 5: mod_base = OTHER; note = 2'-O-methylcytidine-3'-phosphate
  modified_base 6: mod_base = OTHER; note = 2'-deoxy-2'-fluorouridine-3'-phosphate
  modified_base 7: mod_base = OTHER; note = 2'-O-methyladenosine-3'-phosphate
  modified_base 8: mod_base = OTHER; note = 2'-deoxy-2'-fluoroguanosine-3'-phosphate
  modified_base 9: mod_base = OTHER; note = 2'-deoxy-2'-fluoroguanosine-3'-phosphate
  modified_base 10: mod_base = OTHER; note = 2'-O-methyladenosine-3'-phosphate
  modified_base 11: mod_base = OTHER; note = 2'-O-methyladenosine-3'-phosphate
  modified_base 12: mod_base = OTHER; note = 2'-O-methyladenosine-3'-phosphate
  modified_base 13: mod_base = OTHER; note = 2'-O-methyluridine-3'-phosphate
  modified_base 14: mod_base = OTHER; note = 2'-deoxy-2'-fluoroadenosine-3'-phosphate
  modified_base 15: mod_base = OTHER; note = 2'-O-methylcytidine-3'-phosphate
  modified_base 16: mod_base = OTHER; note = 2'-deoxy-2'-fluoroadenosine-3'-phosphate
  modified_base 17: mod_base = OTHER; note = 2'-O-methyladenosine-3'-phosphate
  modified_base 18: mod_base = OTHER; note = 2'-O-methyladenosine-3'-phosphate
  modified_base 19: mod_base = OTHER; note = 2'-O-methylcytidine-3'-phosphate
  modified_base 20: mod_base = OTHER; note = 2'-O-methyladenosine-3'-phosphate
  modified_base 21: mod_base = OTHER; note = 2'-O-methylcytidine-3'-phosphorothioate
  modified_base 22: mod_base = OTHER; note = 2'-O-methylcytidine-3'-phosphorothioate
  modified_base 23: mod_base = OTHER; note = 2'-O-methyluridine
ttctctaggaaatacaaacacct

SEQ ID NO: 269 - RNA, 23 nt, synthetic construct
  source 1..23: mol_type = other RNA
  modified_base 1: mod_base = OTHER; note = 2'-O-methyluridine-3'-phosphorothioate 5'-(E)-Vinylphosphonate
  modified_base 2: mod_base = OTHER; note = 2'-deoxy-2'-fluorouridine-3'-phosphorothioate
  modified_base 3: mod_base = OTHER; note = 2'-O-methyluridine-3'-phosphate
  modified_base 4: mod_base = OTHER; note = 2'-O-methyluridine-3'-phosphate
  modified_base 5: mod_base = OTHER; note = 2'-O-methyladenosine-3'-phosphate
  modified_base 6: mod_base = OTHER; note = 2'-deoxy-2'-fluorocytidine-3'-phosphate
  modified_base 7: mod_base = OTHER; note = 2'-O-methyladenosine-3'-phosphate
  modified_base 8: mod_base = OTHER; note = 2'-deoxy-2'-fluorouridine-3'-phosphate
  modified_base 9: mod_base = OTHER; note = 2'-deoxy-2'-fluoroguanosine-3'-phosphate
  modified_base 10: mod_base = OTHER; note = 2'-O-methyladenosine-3'-phosphate
  modified_base 11: mod_base = OTHER; note = 2'-O-methyluridine-3'-phosphate
  modified_base 12: mod_base = OTHER; note = 2'-O-methylcytidine-3'-phosphate
  modified_base 13: mod_base = OTHER; note = 2'-O-methyladenosine-3'-phosphate
  modified_base 14: mod_base = OTHER; note = 2'-deoxy-2'-fluoroguanosine-3'-phosphate
  modified_base 15: mod_base = OTHER; note = 2'-O-methyluridine-3'-phosphate
  modified_base 16: mod_base = OTHER; note = 2'-deoxy-2'-fluoroadenosine-3'-phosphate
  modified_base 17: mod_base = OTHER; note = 2'-O-methyladenosine-3'-phosphate
  modified_base 18: mod_base = OTHER; note = 2'-O-methylcytidine-3'-phosphate
  modified_base 19: mod_base = OTHER; note = 2'-O-methyladenosine-3'-phosphate
  modified_base 20: mod_base = OTHER; note = 2'-O-methylguanosine-3'-phosphate
  modified_base 21: mod_base = OTHER; note = 2'-O-methyladenosine-3'-phosphorothioate
  modified_base 22: mod_base = OTHER; note = 2'-O-methyluridine-3'-phosphorothioate
  modified_base 23: mod_base = OTHER; note = 2'-O-methyluridine
ttttacatgatcagtaacagatt

SEQ ID NO: 270 - RNA, 23 nt, synthetic construct
  source 1..23: mol_type = other RNA
  modified_base 1: mod_base = OTHER; note = 2'-O-methyluridine-3'-phosphorothioate 5'-(E)-Vinylphosphonate
  modified_base 2: mod_base = OTHER; note = 2'-deoxy-2'-fluorouridine-3'-phosphorothioate
  modified_base 3: mod_base = OTHER; note = 2'-O-methyluridine-3'-phosphate
  modified_base 4: mod_base = OTHER; note = 2'-O-methyluridine-3'-phosphate
  modified_base 5: mod_base = OTHER; note = 2'-O-methyladenosine-3'-phosphate
  modified_base 6: mod_base = OTHER; note = 2'-deoxy-2'-fluorocytidine-3'-phosphate
  modified_base 7: mod_base = OTHER; note = 2'-O-methyladenosine-3'-phosphate
  modified_base 8: mod_base = OTHER; note = 2'-deoxy-2'-fluorouridine-3'-phosphate
  modified_base 9: mod_base = OTHER; note = 2'-deoxy-2'-fluoroguanosine-3'-phosphate
  modified_base 10: mod_base = OTHER; note = 2'-O-methyladenosine-3'-phosphate
  modified_base 11: mod_base = OTHER; note = 2'-O-methyluridine-3'-phosphate
  modified_base 12: mod_base = OTHER; note = 2'-O-methylcytidine-3'-phosphate
  modified_base 13: mod_base = OTHER; note = 2'-O-methyladenosine-3'-phosphate
  modified_base 14: mod_base = OTHER; note = 2'-deoxy-2'-fluoroguanosine-3'-phosphate
  modified_base 15: mod_base = OTHER; note = 2'-O-methyluridine-3'-phosphate
  modified_base 16: mod_base = OTHER; note = 2'-deoxy-2'-fluoroadenosine-3'-phosphate
  modified_base 17: mod_base = OTHER; note = 2'-O-methyladenosine-3'-phosphate
  modified_base 18: mod_base = OTHER; note = 2'-O-methylcytidine-3'-phosphate
  modified_base 19: mod_base = OTHER; note = 2'-O-methyladenosine-3'-phosphate
  modified_base 20: mod_base = OTHER; note = 2'-O-methylguanosine-3'-phosphate
  modified_base 21: mod_base = OTHER; note = 2'-O-methyladenosine-3'-phosphorothioate
  modified_base 22: mod_base = OTHER; note = 2'-O-methyluridine-3'-phosphorothioate
  modified_base 23: mod_base = OTHER; note = 2'-O-methyluridine
ttttacatgatcagtaacagatt

SEQ ID NO: 271 - RNA, 23 nt, synthetic construct
  source 1..23: mol_type = other RNA
  modified_base 1: mod_base = OTHER; note = 2'-O-methyluridine-3'-phosphorothioate 5'-(E)-Vinylphosphonate
  modified_base 2: mod_base = OTHER; note = 2'-deoxy-2'-fluoroadenosine-3'-phosphorothioate
  modified_base 3: mod_base = OTHER; note = 2'-O-methyladenosine-3'-phosphate
  modified_base 4: mod_base = OTHER; note = 2'-O-methylguanosine-3'-phosphate
  modified_base 5: mod_base = OTHER; note = 2'-O-methyluridine-3'-phosphate
  modified_base 6: mod_base = OTHER; note = 2'-deoxy-2'-fluorouridine-3'-phosphate
  modified_base 7: mod_base = OTHER; note = 2'-O-methyluridine-3'-phosphate
  modified_base 8: mod_base = OTHER; note = 2'-deoxy-2'-fluoroadenosine-3'-phosphate
  modified_base 9: mod_base = OTHER; note = 2'-deoxy-2'-fluorocytidine-3'-phosphate
  modified_base 10: mod_base = OTHER; note = 2'-O-methyladenosine-3'-phosphate
  modified_base 11: mod_base = OTHER; note = 2'-O-methyluridine-3'-phosphate
  modified_base 12: mod_base = OTHER; note = 2'-O-methylguanosine-3'-phosphate
  modified_base 13: mod_base = OTHER; note = 2'-O-methyladenosine-3'-phosphate
  modified_base 14: mod_base = OTHER; note = 2'-deoxy-2'-fluorouridine-3'-phosphate
  modified_base 15: mod_base = OTHER; note = 2'-O-methylcytidine-3'-phosphate
  modified_base 16: mod_base = OTHER; note = 2'-deoxy-2'-fluoroadenosine-3'-phosphate
  modified_base 17: mod_base = OTHER; note = 2'-O-methylguanosine-3'-phosphate
  modified_base 18: mod_base = OTHER; note = 2'-O-methyluridine-3'-phosphate
  modified_base 19: mod_base = OTHER; note = 2'-O-methyladenosine-3'-phosphate
  modified_base 20: mod_base = OTHER; note = 2'-O-methyladenosine-3'-phosphate
  modified_base 21: mod_base = OTHER; note = 2'-O-methylcytidine-3'-phosphorothioate
  modified_base 22: mod_base = OTHER; note = 2'-O-methyladenosine-3'-phosphorothioate
  modified_base 23: mod_base = OTHER; note = 2'-O-methylguanosine
taagtttacatgatcagtaacag

SEQ ID NO: 272 - RNA, 23 nt, synthetic construct
  source 1..23: mol_type = other RNA
  modified_base 1: mod_base = OTHER; note = 2'-O-methyluridine-3'-phosphorothioate 5'-(E)-Vinylphosphonate
  modified_base 2: mod_base = OTHER; note = 2'-deoxy-2'-fluorouridine-3'-phosphorothioate
  modified_base 3: mod_base = OTHER; note = 2'-O-methylcytidine-3'-phosphate
  modified_base 4: mod_base = OTHER; note = 2'-O-methyladenosine-3'-phosphate
  modified_base 5: mod_base = OTHER; note = 2'-O-methyladenosine-3'-phosphate
  modified_base 6: mod_base = OTHER; note = 2'-deoxy-2'-fluoroguanosine-3'-phosphate
  modified_base 7: mod_base = OTHER; note = 2'-O-methyluridine-3'-phosphate
  modified_base 8: mod_base = OTHER; note = 2'-deoxy-2'-fluorouridine-3'-phosphate
  modified_base 9: mod_base = OTHER; note = 2'-deoxy-2'-fluorouridine-3'-phosphate
  modified_base 10: mod_base = OTHER; note = 2'-O-methyladenosine-3'-phosphate
  modified_base 11: mod_base = OTHER; note = 2'-O-methylcytidine-3'-phosphate
  modified_base 12: mod_base = OTHER; note = 2'-O-methyladenosine-3'-phosphate
  modified_base 13: mod_base = OTHER; note = 2'-O-methyluridine-3'-phosphate
  modified_base 14: mod_base = OTHER; note = 2'-deoxy-2'-fluoroguanosine-3'-phosphate
  modified_base 15: mod_base = OTHER; note = 2'-O-methyladenosine-3'-phosphate
  modified_base 16: mod_base = OTHER; note = 2'-deoxy-2'-fluorouridine-3'-phosphate
  modified_base 17: mod_base = OTHER; note = 2'-O-methylcytidine-3'-phosphate
  modified_base 18: mod_base = OTHER; note = 2'-O-methyladenosine-3'-phosphate
  modified_base 19: mod_base = OTHER; note = 2'-O-methylguanosine-3'-phosphate
  modified_base 20: mod_base = OTHER; note = 2'-O-methyluridine-3'-phosphate
  modified_base 21: mod_base = OTHER; note = 2'-O-methyladenosine-3'-phosphorothioate
  modified_base 22: mod_base = OTHER; note = 2'-O-methyladenosine-3'-phosphorothioate
  modified_base 23: mod_base = OTHER; note = 2'-O-methylcytidine
ttcaagtttacatgatcagtaac

SEQ ID NO: 273 - RNA, 23 nt, synthetic construct
  source 1..23: mol_type = other RNA
  modified_base 1: mod_base = OTHER; note = 2'-O-methyluridine-3'-phosphorothioate 5'-(E)-Vinylphosphonate
  modified_base 2: mod_base = OTHER; note = 2'-deoxy-2'-fluorouridine-3'-phosphorothioate
  modified_base 3: mod_base = OTHER; note = 2'-O-methylguanosine-3'-phosphate
  modified_base 4: mod_base = OTHER; note = 2'-O-methyluridine-3'-phosphate
  modified_base 5: mod_base = OTHER; note = 2'-O-methylguanosine-3'-phosphate
  modified_base 6: mod_base = OTHER; note = 2'-deoxy-2'-fluoroadenosine-3'-phosphate
  modified_base 7: mod_base = OTHER; note = 2'-O-methyluridine-3'-phosphate
  modified_base 8: mod_base = OTHER; note = 2'-deoxy-2'-fluorocytidine-3'-phosphate
  modified_base 9: mod_base = OTHER; note = 2'-deoxy-2'-fluoroadenosine-3'-phosphate
  modified_base 10: mod_base = OTHER; note = 2'-O-methyladenosine-3'-phosphate
  modified_base 11: mod_base = OTHER; note = 2'-O-methylguanosine-3'-phosphate
  modified_base 12: mod_base = OTHER; note = 2'-O-methyluridine-3'-phosphate
  modified_base 13: mod_base = OTHER; note = 2'-O-methyluridine-3'-phosphate
  modified_base 14: mod_base = OTHER; note = 2'-deoxy-2'-fluorouridine-3'-phosphate
  modified_base 15: mod_base = OTHER; note = 2'-O-methyladenosine-3'-phosphate
  modified_base 16: mod_base = OTHER; note = 2'-deoxy-2'-fluorocytidine-3'-phosphate
  modified_base 17: mod_base = OTHER; note = 2'-O-methyladenosine-3'-phosphate
  modified_base 18: mod_base = OTHER; note = 2'-O-methyluridine-3'-phosphate
  modified_base 19: mod_base = OTHER; note = 2'-O-methylguanosine-3'-phosphate
  modified_base 20: mod_base = OTHER; note = 2'-O-methyladenosine-3'-phosphate
  modified_base 21: mod_base = OTHER; note = 2'-O-methyluridine-3'-phosphorothioate
  modified_base 22: mod_base = OTHER; note = 2'-O-methylcytidine-3'-phosphorothioate
  modified_base 23: mod_base = OTHER; note = 2'-O-methyladenosine
ttgtgatcaagtttacatgatca

SEQ ID NO: 274 - RNA, 23 nt, synthetic construct
  source 1..23: mol_type = other RNA
  modified_base 1: mod_base = OTHER; note = 2'-O-methyluridine-3'-phosphorothioate 5'-(E)-Vinylphosphonate
  modified_base 2: mod_base = OTHER; note = 2'-deoxy-2'-fluoroguanosine-3'-phosphorothioate
  modified_base 3: mod_base = OTHER; note = 2'-O-methyluridine-3'-phosphate
  modified_base 4: mod_base = OTHER; note = 2'-O-methylguanosine-3'-phosphate
  modified_base 5: mod_base = OTHER; note = 2'-O-methyluridine-3'-phosphate
  modified_base 6: mod_base = OTHER; note = 2'-deoxy-2'-fluoroguanosine-3'-phosphate
  modified_base 7: mod_base = OTHER; note = 2'-O-methyladenosine-3'-phosphate
  modified_base 8: mod_base = OTHER; note = 2'-deoxy-2'-fluorouridine-3'-phosphate
  modified_base 9: mod_base = OTHER; note = 2'-deoxy-2'-fluorocytidine-3'-phosphate
  modified_base 10: mod_base = OTHER; note = 2'-O-methyladenosine-3'-phosphate
  modified_base 11: mod_base = OTHER; note = 2'-O-methyladenosine-3'-phosphate
  modified_base 12: mod_base = OTHER; note = 2'-O-methylguanosine-3'-phosphate
  modified_base 13: mod_base = OTHER; note = 2'-O-methyluridine-3'-phosphate
  modified_base 14: mod_base = OTHER; note = 2'-deoxy-2'-fluorouridine-3'-phosphate
  modified_base 15: mod_base = OTHER; note = 2'-O-methyluridine-3'-phosphate
  modified_base 16: mod_base = OTHER; note = 2'-deoxy-2'-fluoroadenosine-3'-phosphate
  modified_base 17: mod_base = OTHER; note = 2'-O-methylcytidine-3'-phosphate
  modified_base 18: mod_base = OTHER; note = 2'-O-methyladenosine-3'-phosphate
  modified_base 19: mod_base = OTHER; note = 2'-O-methyluridine-3'-phosphate
  modified_base 20: mod_base = OTHER; note = 2'-O-methylguanosine-3'-phosphate
  modified_base 21: mod_base = OTHER; note = 2'-O-methyladenosine-3'-phosphorothioate
  modified_base 22: mod_base = OTHER; note = 2'-O-methyluridine-3'-phosphorothioate
  modified_base 23: mod_base = OTHER; note = 2'-O-methylcytidine
tgtgtgatcaagtttacatgatc

SEQ ID NO: 275 - RNA, 23 nt, synthetic construct
  source 1..23: mol_type = other RNA
  modified_base 1: mod_base = OTHER; note = 2'-O-methyluridine-3'-phosphorothioate 5'-(E)-Vinylphosphonate
  modified_base 2: mod_base = OTHER; note = 2'-deoxy-2'-fluorocytidine-3'-phosphorothioate
  modified_base 3: mod_base = OTHER; note = 2'-O-methyladenosine-3'-phosphate
  modified_base 4: mod_base = OTHER; note = 2'-O-methyladenosine-3'-phosphate
  modified_base 5: mod_base = OTHER; note = 2'-O-methylguanosine-3'-phosphate
  modified_base 6: mod_base = OTHER; note = 2'-deoxy-2'-fluoroguanosine-3'-phosphate
  modified_base 7: mod_base = OTHER; note = 2'-O-methyluridine-3'-phosphate
  modified_base 8: mod_base = OTHER; note = 2'-deoxy-2'-fluoroadenosine-3'-phosphate
  modified_base 9: mod_base = OTHER; note = 2'-deoxy-2'-fluoroadenosine-3'-phosphate
  modified_base 10: mod_base = OTHER; note = 2'-O-methyladenosine-3'-phosphate
  modified_base 11: mod_base = OTHER; note = 2'-O-methylguanosine-3'-phosphate
  modified_base 12: mod_base = OTHER; note = 2'-O-methyluridine-3'-phosphate
  modified_base 13: mod_base = OTHER; note = 2'-O-methyluridine-3'-phosphate
  modified_base 14: mod_base = OTHER; note = 2'-deoxy-2'-fluorocytidine-3'-phosphate
  modified_base 15: mod_base = OTHER; note = 2'-O-methyluridine-3'-phosphate
  modified_base 16: mod_base = OTHER; note = 2'-deoxy-2'-fluoroguanosine-3'-phosphate
  modified_base 17: mod_base = OTHER; note = 2'-O-methyluridine-3'-phosphate
  modified_base 18: mod_base = OTHER; note = 2'-O-methyladenosine-3'-phosphate
  modified_base 19: mod_base = OTHER; note = 2'-O-methylguanosine-3'-phosphate
  modified_base 20: mod_base = OTHER; note = 2'-O-methyladenosine-3'-phosphate
  modified_base 21: mod_base = OTHER; note = 2'-O-methylguanosine-3'-phosphorothioate
  modified_base 22: mod_base = OTHER; note = 2'-O-methylguanosine-3'-phosphorothioate
  modified_base 23: mod_base = OTHER; note = 2'-O-methylcytidine
tcaaggtaaagttctgtagaggc

SEQ ID NO: 276 - RNA, 23 nt, synthetic construct
  source 1..23: mol_type = other RNA
  modified_base 1: mod_base = OTHER; note = 2'-O-methyluridine-3'-phosphorothioate 5'-(E)-Vinylphosphonate
  modified_base 2: mod_base = OTHER; note = 2'-deoxy-2'-fluorouridine-3'-phosphorothioate
  modified_base 3: mod_base = OTHER; note = 2'-O-methylcytidine-3'-phosphate
  modified_base 4: mod_base = OTHER; note = 2'-O-methylguanosine-3'-phosphate
  modified_base 5: mod_base = OTHER; note = 2'-O-methyladenosine-3'-phosphate
  modified_base 6: mod_base = OTHER; note = 2'-deoxy-2'-fluoroadenosine-3'-phosphate
  modified_base 7: mod_base = OTHER; note = 2'-O-methyladenosine-3'-phosphate
  modified_base 8: mod_base = OTHER; note = 2'-deoxy-2'-fluoroadenosine-3'-phosphate
  modified_base 9: mod_base = OTHER; note = 2'-deoxy-2'-fluorocytidine-3'-phosphate
  modified_base 10: mod_base = OTHER; note = 2'-O-methyladenosine-3'-phosphate
  modified_base 11: mod_base = OTHER; note = 2'-O-methylcytidine-3'-phosphate
  modified_base 12: mod_base = OTHER; note = 2'-O-methyladenosine-3'-phosphate
  modified_base 13: mod_base = OTHER; note = 2'-O-methyladenosine-3'-phosphate
  modified_base 14: mod_base = OTHER; note = 2'-deoxy-2'-fluoroguanosine-3'-phosphate
  modified_base 15: mod_base = OTHER; note = 2'-O-methylguanosine-3'-phosphate
  modified_base 16: mod_base = OTHER; note = 2'-deoxy-2'-fluorouridine-3'-phosphate
  modified_base 17: mod_base = OTHER; note = 2'-O-methyladenosine-3'-phosphate
  modified_base 18: mod_base = OTHER; note = 2'-O-methyladenosine-3'-phosphate
  modified_base 19: mod_base = OTHER; note = 2'-O-methyladenosine-3'-phosphate
  modified_base 20: mod_base = OTHER; note = 2'-O-methylguanosine-3'-phosphate
  modified_base 21: mod_base = OTHER; note = 2'-O-methyluridine-3'-phosphorothioate
  modified_base 22: mod_base = OTHER; note = 2'-O-methyluridine-3'-phosphorothioate
  modified_base 23: mod_base = OTHER; note = 2'-O-methylcytidine
ttcgaaaacacaaggtaaagttc

SEQ ID NO: 277 - RNA, 23 nt, synthetic construct
  source 1..23: mol_type = other RNA
  modified_base 1: mod_base = OTHER; note = 2'-O-methyluridine-3'-phosphorothioate 5'-(E)-Vinylphosphonate
  modified_base 2: mod_base = OTHER; note = 2'-deoxy-2'-fluoroadenosine-3'-phosphorothioate
  modified_base 3: mod_base = OTHER; note = 2'-O-methyluridine-3'-phosphate
  modified_base 4: mod_base = OTHER; note = 2'-O-methylcytidine-3'-phosphate
  modified_base 5: mod_base = OTHER; note = 2'-O-methyladenosine-3'-phosphate
  modified_base 6: mod_base = OTHER; note = 2'-deoxy-2'-fluorocytidine-3'-phosphate
  modified_base 7: mod_base = OTHER; note = 2'-O-methyluridine-3'-phosphate
  modified_base 8: mod_base = OTHER; note = 2'-deoxy-2'-fluoroadenosine-3'-phosphate
  modified_base 9: mod_base = OTHER; note = 2'-deoxy-2'-fluorouridine-3'-phosphate
  modified_base 10: mod_base = OTHER; note = 2'-O-methyladenosine-3'-phosphate
  modified_base 11: mod_base = OTHER; note = 2'-O-methylguanosine-3'-phosphate
  modified_base 12: mod_base = OTHER; note = 2'-O-methylguanosine-3'-phosphate
  modified_base 13: mod_base = OTHER; note = 2'-O-methylcytidine-3'-phosphate
  modified_base 14: mod_base = OTHER; note = 2'-deoxy-2'-fluorouridine-3'-phosphate
  modified_base 15: mod_base = OTHER; note = 2'-O-methylcytidine-3'-phosphate
  modified_base 16: mod_base = OTHER; note = 2'-deoxy-2'-fluoroguanosine-3'-phosphate
  modified_base 17: mod_base = OTHER; note = 2'-O-methyladenosine-3'-phosphate
  modified_base 18: mod_base = OTHER; note = 2'-O-methyladenosine-3'-phosphate
  modified_base 19: mod_base = OTHER; note = 2'-O-methyladenosine-3'-phosphate
  modified_base 20: mod_base = OTHER; note = 2'-O-methyladenosine-3'-phosphate
  modified_base 21: mod_base = OTHER; note = 2'-O-methylcytidine-3'-phosphorothioate
  modified_base 22: mod_base = OTHER; note = 2'-O-methyladenosine-3'-phosphorothioate
  modified_base 23: mod_base = OTHER; note = 2'-O-methylcytidine
tatcactataggctcgaaaacac

SEQ ID NO: 278 - RNA, 23 nt, synthetic construct
  source 1..23: mol_type = other RNA
  modified_base 1: mod_base = OTHER; note = 2'-O-methyluridine-3'-phosphorothioate 5'-(E)-Vinylphosphonate
  modified_base 2: mod_base = OTHER; note = 2'-deoxy-2'-fluoroadenosine-3'-phosphorothioate
  modified_base 3: mod_base = OTHER; note = 2'-O-methylguanosine-3'-phosphate
  modified_base 4: mod_base = OTHER; note = 2'-O-methylcytidine-3'-phosphate
  modified_base 5: mod_base = OTHER; note = 2'-O-methyluridine-3'-phosphate
  modified_base 6: mod_base = OTHER; note = 2'-deoxy-2'-fluorouridine-3'-phosphate
  modified_base 7: mod_base = OTHER; note = 2'-O-methylcytidine-3'-phosphate
  modified_base 8: mod_base = OTHER; note = 2'-deoxy-2'-fluoroadenosine-3'-phosphate
  modified_base 9: mod_base = OTHER; note = 2'-deoxy-2'-fluorocytidine-3'-phosphate
  modified_base 10: mod_base = OTHER; note = 2'-O-methyladenosine-3'-phosphate
  modified_base 11: mod_base = OTHER; note = 2'-O-methyluridine-3'-phosphate
  modified_base 12: mod_base = OTHER; note = 2'-O-methylguanosine-3'-phosphate
  modified_base 13: mod_base = OTHER; note = 2'-O-methyladenosine-3'-phosphate
  modified_base 14: mod_base = OTHER; note = 2'-deoxy-2'-fluorouridine-3'-phosphate
  modified_base 15: mod_base = OTHER; note = 2'-O-methylcytidine-3'-phosphate
  modified_base 16: mod_base = OTHER; note = 2'-deoxy-2'-fluoroadenosine-3'-phosphate
  modified_base 17: mod_base = OTHER; note = 2'-O-methylguanosine-3'-phosphate
  modified_base 18: mod_base = OTHER; note = 2'-O-methyluridine-3'-phosphate
  modified_base 19: mod_base = OTHER; note = 2'-O-methyluridine-3'-phosphate
  modified_base 20: mod_base = OTHER; note = 2'-O-methyluridine-3'-phosphate
  modified_base 21: mod_base = OTHER; note = 2'-O-methylcytidine-3'-phosphorothioate
  modified_base 22: mod_base = OTHER; note = 2'-O-methyladenosine-3'-phosphorothioate
  modified_base 23: mod_base = OTHER; note = 2'-O-methylguanosine
tagcttcacatgatcagtttcag

SEQ ID NO: 279 - RNA, 23 nt, synthetic construct
  source 1..23: mol_type = other RNA
  modified_base 1: mod_base = OTHER; note = 2'-O-methyluridine-3'-phosphorothioate 5'-(E)-Vinylphosphonate
  modified_base 2: mod_base = OTHER; note = 2'-deoxy-2'-fluoroguanosine-3'-phosphorothioate
  modified_base 3: mod_base = OTHER; note = 2'-O-methyluridine-3'-phosphate
  modified_base 4: mod_base = OTHER; note = 2'-O-methylguanosine-3'-phosphate
  modified_base 5: mod_base = OTHER; note = 2'-O-methyluridine-3'-phosphate
  modified_base 6: mod_base = OTHER; note = 2'-deoxy-2'-fluoroadenosine-3'-phosphate
  modified_base 7: mod_base = OTHER; note = 2'-O-methyladenosine-3'-phosphate
  modified_base 8: mod_base = OTHER; note = 2'-deoxy-2'-fluoroadenosine-3'-phosphate
  modified_base 9: mod_base = OTHER; note = 2'-deoxy-2'-fluoroadenosine-3'-phosphate
  modified_base 10: mod_base = OTHER; note = 2'-O-methyluridine-3'-phosphate
  modified_base 11: mod_base = OTHER; note = 2'-O-methyluridine-3'-phosphate
  modified_base 12: mod_base = OTHER; note = 2'-O-methylcytidine-3'-phosphate
  modified_base 13: mod_base = OTHER; note = 2'-O-methyluridine-3'-phosphate
  modified_base 14: mod_base = OTHER; note = 2'-deoxy-2'-fluoroguanosine-3'-phosphate
  modified_base 15: mod_base = OTHER; note = 2'-O-methylcytidine-3'-phosphate
  modified_base 16: mod_base = OTHER; note = 2'-deoxy-2'-fluoroadenosine-3'-phosphate
  modified_base 17: mod_base = OTHER; note = 2'-O-methylguanosine-3'-phosphate
  modified_base 18: mod_base = OTHER; note = 2'-O-methyladenosine-3'-phosphate
  modified_base 19: mod_base = OTHER; note = 2'-O-methylguanosine-3'-phosphate
  modified_base 20: mod_base = OTHER; note = 2'-O-methylguanosine-3'-phosphate
  modified_base 21: mod_base = OTHER; note = 2'-O-methyluridine-3'-phosphorothioate
  modified_base 22: mod_base = OTHER; note = 2'-O-methyluridine-3'-phosphorothioate
  modified_base 23: mod_base = OTHER; note = 2'-O-methyluridine
tgtgtaaaattctgcagaggttt

SEQ ID NO: 280 - RNA, 23 nt, synthetic construct
  source 1..23: mol_type = other RNA
  modified_base 1: mod_base = OTHER; note = 2'-O-methyluridine-3'-phosphorothioate 5'-(E)-Vinylphosphonate
  modified_base 2: mod_base = OTHER; note = 2'-deoxy-2'-fluoroadenosine-3'-phosphorothioate
  modified_base 3: mod_base = OTHER; note = 2'-O-methyladenosine-3'-phosphate
  modified_base 4: mod_base = OTHER; note = 2'-O-methylcytidine-3'-phosphate
  modified_base 5: mod_base = OTHER; note = 2'-O-methyladenosine-3'-phosphate
  modified_base 6: mod_base = OTHER; note = 2'-deoxy-2'-fluorocytidine-3'-phosphate
  modified_base 7: mod_base = OTHER; note = 2'-O-methyladenosine-3'-phosphate
  modified_base 8: mod_base = OTHER; note = 2'-deoxy-2'-fluoroguanosine-3'-phosphate
  modified_base 9: mod_base = OTHER; note = 2'-deoxy-2'-fluorouridine-3'-phosphate
  modified_base 10: mod_base = OTHER; note = 2'-O-methylguanosine-3'-phosphate
  modified_base 11: mod_base = OTHER; note = 2'-O-methyluridine-3'-phosphate
  modified_base 12: mod_base = OTHER; note = 2'-O-methyladenosine-3'-phosphate
  modified_base 13: mod_base = OTHER; note = 2'-O-methyladenosine-3'-phosphate
  modified_base 14: mod_base = OTHER; note = 2'-deoxy-2'-fluoroadenosine-3'-phosphate
  modified_base 15: mod_base = OTHER; note = 2'-O-methyladenosine-3'-phosphate
  modified_base 16: mod_base = OTHER; note = 2'-deoxy-2'-fluorouridine-3'-phosphate
  modified_base 17: mod_base = OTHER; note = 2'-O-methyluridine-3'-phosphate
  modified_base 18: mod_base = OTHER; note = 2'-O-methylcytidine-3'-phosphate
  modified_base 19: mod_base = OTHER; note = 2'-O-methyluridine-3'-phosphate
  modified_base 20: mod_base = OTHER; note = 2'-O-methylguanosine-3'-phosphate
  modified_base 21: mod_base = OTHER; note = 2'-O-methylcytidine-3'-phosphorothioate
  modified_base 22: mod_base = OTHER; note = 2'-O-methyladenosine-3'-phosphorothioate
  modified_base 23: mod_base = OTHER; note = 2'-O-methylguanosine
taacacagtgtaaaattctgcag

SEQ ID NO: 281 - RNA, 23 nt, synthetic construct
  source 1..23: mol_type = other RNA
  modified_base 1: mod_base = OTHER; note = 2'-O-methyluridine-3'-phosphorothioate 5'-(E)-Vinylphosphonate
  modified_base 2: mod_base = OTHER; note = 2'-deoxy-2'-fluoroadenosine-3'-phosphorothioate
  modified_base 3: mod_base = OTHER; note = 2'-O-methyladenosine-3'-phosphate
  modified_base 4: mod_base = OTHER; note = 2'-O-methyladenosine-3'-phosphate
  modified_base 5: mod_base = OTHER; note = 2'-O-methylcytidine-3'-phosphate
  modified_base 6: mod_base = OTHER; note = 2'-deoxy-2'-fluoroadenosine-3'-phosphate
  modified_base 7: mod_base = OTHER; note = 2'-O-methylcytidine-3'-phosphate
  modified_base 8: mod_base = OTHER; note = 2'-deoxy-2'-fluoroadenosine-3'-phosphate
  modified_base 9: mod_base = OTHER; note = 2'-deoxy-2'-fluoroguanosine-3'-phosphate
  modified_base 10: mod_base = OTHER; note = 2'-O-methyluridine-3'-phosphate
  modified_base 11: mod_base = OTHER; note = 2'-O-methylguanosine-3'-phosphate
  modified_base 12: mod_base = OTHER; note = 2'-O-methyluridine-3'-phosphate
  modified_base 13: mod_base = OTHER; note = 2'-O-methyladenosine-3'-phosphate
  modified_base 14: mod_base = OTHER; note = 2'-deoxy-2'-fluoroadenosine-3'-phosphate
  modified_base 15: mod_base = OTHER; note = 2'-O-methyladenosine-3'-phosphate
  modified_base 16: mod_base = OTHER; note = 2'-deoxy-2'-fluoroadenosine-3'-phosphate
  modified_base 17: mod_base = OTHER; note = 2'-O-methyluridine-3'-phosphate
  modified_base 18: mod_base = OTHER; note = 2'-O-methyluridine-3'-phosphate
  modified_base 19: mod_base = OTHER; note = 2'-O-methylcytidine-3'-phosphate
  modified_base 20: mod_base = OTHER; note = 2'-O-methyluridine-3'-phosphate
  modified_base 21: mod_base = OTHER; note = 2'-O-methylguanosine-3'-phosphorothioate
  modified_base 22: mod_base = OTHER; note = 2'-O-methylcytidine-3'-phosphorothioate
  modified_base 23: mod_base = OTHER; note = 2'-O-methyladenosine
taaacacagtgtaaaattctgca

SEQ ID NO: 282 - RNA, 23 nt, synthetic construct
  source 1..23: mol_type = other RNA
  modified_base 1: mod_base = OTHER; note = 2'-O-methyluridine-3'-phosphorothioate 5'-(E)-Vinylphosphonate
  modified_base 2: mod_base = OTHER; note = 2'-deoxy-2'-fluorouridine-3'-phosphorothioate
  modified_base 3: mod_base = OTHER; note = 2'-O-methyladenosine-3'-phosphate
  modified_base 4: mod_base = OTHER; note = 2'-O-methyluridine-3'-phosphate
  modified_base 5: mod_base = OTHER; note = 2'-O-methyladenosine-3'-phosphate
  modified_base 6: mod_base = OTHER; note = 2'-deoxy-2'-fluoroadenosine-3'-phosphate
  modified_base 7: mod_base = OTHER; note = 2'-O-methyladenosine-3'-phosphate
  modified_base 8: mod_base = OTHER; note = 2'-deoxy-2'-fluorocytidine-3'-phosphate
  modified_base 9: mod_base = OTHER; note = 2'-deoxy-2'-fluorouridine-3'-phosphate
  modified_base 10: mod_base = OTHER; note = 2'-O-methyladenosine-3'-phosphate
  modified_base 11: mod_base = OTHER; note = 2'-O-methylguanosine-3'-phosphate
  modified_base 12: mod_base = OTHER; note = 2'-O-methyluridine-3'-phosphate
  modified_base 13: mod_base = OTHER; note = 2'-O-methyladenosine-3'-phosphate
  modified_base 14: mod_base = OTHER; note = 2'-deoxy-2'-fluoroguanosine-3'-phosphate
  modified_base 15: mod_base = OTHER; note = 2'-O-methylcytidine-3'-phosphate
  modified_base 16: mod_base = OTHER; note = 2'-deoxy-2'-fluorouridine-3'-phosphate
  modified_base 17: mod_base = OTHER; note = 2'-O-methylcytidine-3'-phosphate
  modified_base 18: mod_base = OTHER; note = 2'-O-methyladenosine-3'-phosphate
  modified_base 19: mod_base = OTHER; note = 2'-O-methyluridine-3'-phosphate
  modified_base 20: mod_base = OTHER; note = 2'-O-methyluridine-3'-phosphate
  modified_base 21: mod_base = OTHER; note = 2'-O-methyladenosine-3'-phosphorothioate
  modified_base 22: mod_base = OTHER; note = 2'-O-methyluridine-3'-phosphorothioate
  modified_base 23: mod_base = OTHER; note = 2'-O-methylcytidine
ttataaactagtagctcattatc

SEQ ID NO: 283 - RNA, 23 nt, synthetic construct
  source 1..23: mol_type = other RNA
  modified_base 1: mod_base = OTHER; note = 2'-O-methyluridine-3'-phosphorothioate 5'-(E)-Vinylphosphonate
  modified_base 2: mod_base = OTHER; note = 2'-deoxy-2'-fluorouridine-3'-phosphorothioate
  modified_base 3: mod_base = OTHER; note = 2'-O-methyluridine-3'-phosphate
  modified_base 4: mod_base = OTHER; note = 2'-O-methyladenosine-3'-phosphate
  modified_base 5: mod_base = OTHER; note = 2'-O-methyluridine-3'-phosphate
  modified_base 6: mod_base = OTHER; note = 2'-deoxy-2'-fluoroadenosine-3'-phosphate
  modified_base 7: mod_base = OTHER; note = 2'-O-methyladenosine-3'-phosphate
  modified_base 8: mod_base = OTHER; note = 2'-deoxy-2'-fluoroadenosine-3'-phosphate
  modified_base 9: mod_base = OTHER; note = 2'-deoxy-2'-fluorocytidine-3'-phosphate
  modified_base 10: mod_base = OTHER; note = 2'-O-methyluridine-3'-phosphate
  modified_base 11: mod_base = OTHER; note = 2'-O-methyladenosine-3'-phosphate
  modified_base 12: mod_base = OTHER; note = 2'-O-methylguanosine-3'-phosphate
  modified_base 13: mod_base = OTHER; note = 2'-O-methyluridine-3'-phosphate
  modified_base 14: mod_base = OTHER; note = 2'-deoxy-2'-fluoroadenosine-3'-phosphate
  modified_base 15: mod_base = OTHER; note = 2'-O-methylguanosine-3'-phosphate
  modified_base 16: mod_base = OTHER; note = 2'-deoxy-2'-fluorocytidine-3'-phosphate
  modified_base 17: mod_base = OTHER; note = 2'-O-methyluridine-3'-phosphate
  modified_base 18: mod_base = OTHER; note = 2'-O-methylcytidine-3'-phosphate
  modified_base 19: mod_base = OTHER; note = 2'-O-methyladenosine-3'-phosphate
  modified_base 20: mod_base = OTHER; note = 2'-O-methyluridine-3'-phosphate
  modified_base 21: mod_base = OTHER; note = 2'-O-methyluridine-3'-phosphorothioate
  modified_base 22: mod_base = OTHER; note = 2'-O-methyladenosine-3'-phosphorothioate
  modified_base 23: mod_base = OTHER; note = 2'-O-methyluridine
tttataaactagtagctcattat

SEQ ID NO: 284 - RNA, 23 nt, synthetic construct
  source 1..23: mol_type = other RNA
  modified_base 1: mod_base = OTHER; note = 2'-O-methyluridine-3'-phosphorothioate 5'-(E)-Vinylphosphonate
  modified_base 2: mod_base = OTHER; note = 2'-deoxy-2'-fluorouridine-3'-phosphorothioate
  modified_base 3: mod_base = OTHER; note = 2'-O-methyluridine-3'-phosphate
  modified_base 4: mod_base = OTHER; note = 2'-O-methyluridine-3'-phosphate
  modified_base 5: mod_base = OTHER; note = 2'-O-methyladenosine-3'-phosphate
  modified_base 6: mod_base = OTHER; note = 2'-deoxy-2'-fluorouridine-3'-phosphate
  modified_base 7: mod_base = OTHER; note = 2'-O-methyladenosine-3'-phosphate
  modified_base 8: mod_base = OTHER; note = 2'-deoxy-2'-fluoroadenosine-3'-phosphate
  modified_base 9: mod_base = OTHER; note = 2'-deoxy-2'-fluoroadenosine-3'-phosphate
  modified_base 10: mod_base = OTHER; note = 2'-O-methylcytidine-3'-phosphate
  modified_base 11: mod_base = OTHER; note = 2'-O-methyluridine-3'-phosphate
  modified_base 12: mod_base = OTHER; note = 2'-O-methyladenosine-3'-phosphate
  modified_base 13: mod_base = OTHER; note = 2'-O-methylguanosine-3'-phosphate
  modified_base 14: mod_base = OTHER; note = 2'-deoxy-2'-fluorouridine-3'-phosphate
  modified_base 15: mod_base = OTHER; note = 2'-O-methyladenosine-3'-phosphate
  modified_base 16: mod_base = OTHER; note = 2'-deoxy-2'-fluoroguanosine-3'-phosphate
  modified_base 17: mod_base = OTHER; note = 2'-O-methylcytidine-3'-phosphate
  modified_base 18: mod_base = OTHER; note = 2'-O-methyluridine-3'-phosphate
  modified_base 19: mod_base = OTHER; note = 2'-O-methylcytidine-3'-phosphate
  modified_base 20: mod_base = OTHER; note = 2'-O-methyladenosine-3'-phosphate
  modified_base 21: mod_base = OTHER; note = 2'-O-methyluridine-3'-phosphorothioate
  modified_base 22: mod_base = OTHER; note = 2'-O-methyluridine-3'-phosphorothioate
  modified_base 23: mod_base = OTHER; note = 2'-O-methyladenosine
ttttataaactagtagctcatta

SEQ ID NO: 285 - RNA, 23 nt, synthetic construct
  source 1..23: mol_type = other RNA
  modified_base 1: mod_base = OTHER; note = 2'-O-methyluridine-3'-phosphorothioate 5'-(E)-Vinylphosphonate
  modified_base 2: mod_base = OTHER; note = 2'-deoxy-2'-fluorocytidine-3'-phosphorothioate
  modified_base 3: mod_base = OTHER; note = 2'-O-methyluridine-3'-phosphate
  modified_base 4: mod_base = OTHER; note = 2'-O-methyluridine-3'-phosphate
  modified_base 5: mod_base = OTHER; note = 2'-O-methyluridine-3'-phosphate
  modified_base 6: mod_base = OTHER; note = 2'-deoxy-2'-fluoroadenosine-3'-phosphate
  modified_base 7: mod_base = OTHER; note = 2'-O-methyluridine-3'-phosphate
  modified_base 8: mod_base = OTHER; note = 2'-deoxy-2'-fluoroadenosine-3'-phosphate
  modified_base 9: mod_base = OTHER; note = 2'-deoxy-2'-fluoroadenosine-3'-phosphate
  modified_base 10: mod_base = OTHER; note = 2'-O-methyladenosine-3'-phosphate
  modified_base 11: mod_base = OTHER; note = 2'-O-methylcytidine-3'-phosphate
  modified_base 12: mod_base = OTHER; note = 2'-O-methyluridine-3'-phosphate
  modified_base 13: mod_base = OTHER; note = 2'-O-methyladenosine-3'-phosphate
  modified_base 14: mod_base = OTHER; note = 2'-deoxy-2'-fluoroguanosine-3'-phosphate
  modified_base 15: mod_base = OTHER; note = 2'-O-methyluridine-3'-phosphate
  modified_base 16: mod_base = OTHER; note = 2'-deoxy-2'-fluoroadenosine-3'-phosphate
  modified_base 17: mod_base = OTHER; note = 2'-O-methylguanosine-3'-phosphate
  modified_base 18: mod_base = OTHER; note = 2'-O-methylcytidine-3'-phosphate
  modified_base 19: mod_base = OTHER; note = 2'-O-methyluridine-3'-phosphate
  modified_base 20: mod_base = OTHER; note = 2'-O-methylcytidine-3'-phosphate
  modified_base 21: mod_base = OTHER; note = 2'-O-methyladenosine-3'-phosphorothioate
  modified_base 22: mod_base = OTHER; note = 2'-O-methyluridine-3'-phosphorothioate
  modified_base 23: mod_base = OTHER; note = 2'-O-methyluridine
tctttataaactagtagctcatt

SEQ ID NO: 286 - RNA, 23 nt, synthetic construct
  source 1..23: mol_type = other RNA
  modified_base 1: mod_base = OTHER; note = 2'-O-methyluridine-3'-phosphorothioate 5'-(E)-Vinylphosphonate
  modified_base 2: mod_base = OTHER; note = 2'-deoxy-2'-fluorouridine-3'-phosphorothioate
  modified_base 3: mod_base = OTHER; note = 2'-O-methylcytidine-3'-phosphate
  modified_base 4: mod_base = OTHER; note = 2'-O-methyluridine-3'-phosphate
  modified_base 5: mod_base = OTHER; note = 2'-O-methyluridine-3'-phosphate
  modified_base 6: mod_base = OTHER; note = 2'-deoxy-2'-fluorouridine-3'-phosphate
  modified_base 7: mod_base = OTHER; note = 2'-O-methyladenosine-3'-phosphate
  modified_base 8: mod_base = OTHER; note = 2'-deoxy-2'-fluorouridine-3'-phosphate
  modified_base 9: mod_base = OTHER; note = 2'-deoxy-2'-fluoroadenosine-3'-phosphate
  modified_base 10: mod_base = OTHER; note = 2'-O-methyladenosine-3'-phosphate
  modified_base 11: mod_base = OTHER; note = 2'-O-methyladenosine-3'-phosphate
  modified_base 12: mod_base = OTHER; note = 2'-O-methylcytidine-3'-phosphate
  modified_base 13: mod_base = OTHER; note = 2'-O-methyluridine-3'-phosphate
  modified_base 14: mod_base = OTHER; note = 2'-deoxy-2'-fluoroadenosine-3'-phosphate
  modified_base 15: mod_base = OTHER; note = 2'-O-methylguanosine-3'-phosphate
  modified_base 16: mod_base = OTHER; note = 2'-deoxy-2'-fluorouridine-3'-phosphate
  modified_base 17: mod_base = OTHER; note = 2'-O-methyladenosine-3'-phosphate
  modified_base 18: mod_base = OTHER; note = 2'-O-methylguanosine-3'-phosphate
  modified_base 19: mod_base = OTHER; note = 2'-O-methylcytidine-3'-phosphate
  modified_base 20: mod_base = OTHER; note = 2'-O-methyluridine-3'-phosphate
  modified_base 21: mod_base = OTHER; note = 2'-O-methylcytidine-3'-phosphorothioate
  modified_base 22: mod_base = OTHER; note = 2'-O-methyladenosine-3'-phosphorothioate
  modified_base 23: mod_base = OTHER; note = 2'-O-methyluridine
ttctttataaactagtagctcat

SEQ ID NO: 287 - RNA, 23 nt, synthetic construct
  source 1..23: mol_type = other RNA
  modified_base 1: mod_base = OTHER; note = 2'-O-methyluridine-3'-phosphorothioate 5'-(E)-Vinylphosphonate
  modified_base 2: mod_base = OTHER; note = 2'-deoxy-2'-fluorouridine-3'-phosphorothioate
  modified_base 3: mod_base = OTHER; note = 2'-O-methyluridine-3'-phosphate
  modified_base 4: mod_base = OTHER; note = 2'-O-methylcytidine-3'-phosphate
  modified_base 5: mod_base = OTHER; note = 2'-O-methyluridine-3'-phosphate
  modified_base 6: mod_base = OTHER; note = 2'-deoxy-2'-fluorouridine-3'-phosphate
  modified_base 7: mod_base = OTHER; note = 2'-O-methyluridine-3'-phosphate
  modified_base 8: mod_base = OTHER; note = 2'-deoxy-2'-fluoroadenosine-3'-phosphate
  modified_base 9: mod_base = OTHER; note = 2'-deoxy-2'-fluorouridine-3'-phosphate
  modified_base 10: mod_base = OTHER; note = 2'-O-methyladenosine-3'-phosphate
  modified_base 11: mod_base = OTHER; note = 2'-O-methyladenosine-3'-phosphate
  modified_base 12: mod_base = OTHER; note = 2'-O-methyladenosine-3'-phosphate
  modified_base 13: mod_base = OTHER; note = 2'-O-methylcytidine-3'-phosphate
  modified_base 14: mod_base = OTHER; note = 2'-deoxy-2'-fluorouridine-3'-phosphate
  modified_base 15: mod_base = OTHER; note = 2'-O-methyladenosine-3'-phosphate
  modified_base 16: mod_base = OTHER; note = 2'-deoxy-2'-fluoroguanosine-3'-phosphate
  modified_base 17: mod_base = OTHER; note = 2'-O-methyluridine-3'-phosphate
  modified_base 18: mod_base = OTHER; note = 2'-O-methyladenosine-3'-phosphate
  modified_base 19: mod_base = OTHER; note = 2'-O-methylguanosine-3'-phosphate
  modified_base 20: mod_base = OTHER; note = 2'-O-methylcytidine-3'-phosphate
  modified_base 21: mod_base = OTHER; note = 2'-O-methyluridine-3'-phosphorothioate
  modified_base 22: mod_base = OTHER; note = 2'-O-methylcytidine-3'-phosphorothioate
  modified_base 23: mod_base = OTHER; note = 2'-O-methyladenosine
tttctttataaactagtagctca

SEQ ID NO: 288 - RNA, 23 nt, synthetic construct
  source 1..23: mol_type = other RNA
  modified_base 1: mod_base = OTHER; note = 2'-O-methyluridine-3'-phosphorothioate 5'-(E)-Vinylphosphonate
  modified_base 2: mod_base = OTHER; note = 2'-deoxy-2'-fluorouridine-3'-phosphorothioate
  modified_base 3: mod_base = OTHER; note = 2'-O-methylcytidine-3'-phosphate
  modified_base 4: mod_base = OTHER; note = 2'-O-methyladenosine-3'-phosphate
  modified_base 5: mod_base = OTHER; note = 2'-O-methylcytidine-3'-phosphate
  modified_base 6: mod_base = OTHER; note = 2'-deoxy-2'-fluorouridine-3'-phosphate
  modified_base 7: mod_base = OTHER; note = 2'-O-methylguanosine-3'-phosphate
  modified_base 8: mod_base = OTHER; note = 2'-deoxy-2'-fluorouridine-3'-phosphate
  modified_base 9: mod_base = OTHER; note = 2'-deoxy-2'-fluoroadenosine-3'-phosphate
  modified_base 10: mod_base = OTHER; note = 2'-O-methylguanosine-3'-phosphate
  modified_base 11: mod_base = OTHER; note = 2'-O-methylguanosine-3'-phosphate
  modified_base 12: mod_base = OTHER; note = 2'-O-methyluridine-3'-phosphate
  modified_base 13: mod_base = OTHER; note = 2'-O-methyluridine-3'-phosphate
  modified_base 14: mod_base = OTHER; note = 2'-deoxy-2'-fluorocytidine-3'-phosphate
  modified_base 15: mod_base = OTHER; note = 2'-O-methylguanosine-3'-phosphate
  modified_base 16: mod_base = OTHER; note = 2'-deoxy-2'-fluoroguanosine-3'-phosphate
  modified_base 17: mod_base = OTHER; note = 2'-O-methyladenosine-3'-phosphate
  modified_base 18: mod_base = OTHER; note = 2'-O-methyladenosine-3'-phosphate
  modified_base 19: mod_base = OTHER; note = 2'-O-methyladenosine-3'-phosphate
  modified_base 20: mod_base = OTHER; note = 2'-O-methylcytidine-3'-phosphate
  modified_base 21: mod_base = OTHER; note = 2'-O-methyladenosine-3'-phosphorothioate
  modified_base 22: mod_base = OTHER; note = 2'-O-methylcytidine-3'-phosphorothioate
  modified_base 23: mod_base = OTHER; note = 2'-O-methyladenosine
ttcactgtaggttcggaaacaca

SEQ ID NO: 289 - RNA, 23 nt, synthetic construct
  source 1..23: mol_type = other RNA
  modified_base 1: mod_base = OTHER; note = 2'-O-methyluridine-3'-phosphorothioate 5'-(E)-Vinylphosphonate
  modified_base 2: mod_base = OTHER; note = 2'-deoxy-2'-fluorocytidine-3'-phosphorothioate
  modified_base 3: mod_base = OTHER; note = 2'-O-methyluridine-3'-phosphate
  modified_base 4: mod_base = OTHER; note = 2'-O-methyluridine-3'-phosphate
  modified_base 5: mod_base = OTHER; note = 2'-O-methyluridine-3'-phosphate
  modified_base 6: mod_base = OTHER; note = 2'-deoxy-2'-fluorocytidine-3'-phosphate
  modified_base 7: mod_base = OTHER; note = 2'-O-methyluridine-3'-phosphate
  modified_base 8: mod_base = OTHER; note = 2'-deoxy-2'-fluorouridine-3'-phosphate
  modified_base 9: mod_base = OTHER; note = 2'-deoxy-2'-fluorouridine-3'-phosphate
  modified_base 10: mod_base = OTHER; note = 2'-O-methyladenosine-3'-phosphate
  modified_base 11: mod_base = OTHER; note = 2'-O-methyluridine-3'-phosphate
  modified_base 12: mod_base = OTHER; note = 2'-O-methyladenosine-3'-phosphate
  modified_base 13: mod_base = OTHER; note = 2'-O-methyladenosine-3'-phosphate
  modified_base 14: mod_base = OTHER; note = 2'-deoxy-2'-fluoroadenosine-3'-phosphate
  modified_base 15: mod_base = OTHER; note = 2'-O-methylcytidine-3'-phosphate
  modified_base 16: mod_base = OTHER; note = 2'-deoxy-2'-fluorouridine-3'-phosphate
  modified_base 17: mod_base = OTHER; note = 2'-O-methyladenosine-3'-phosphate
  modified_base 18: mod_base = OTHER; note = 2'-O-methylguanosine-3'-phosphate
  modified_base 19: mod_base = OTHER; note = 2'-O-methyluridine-3'-phosphate
  modified_base 20: mod_base = OTHER; note = 2'-O-methyladenosine-3'-phosphate
  modified_base 21: mod_base = OTHER; note = 2'-O-methylguanosine-3'-phosphorothioate
  modified_base 22: mod_base = OTHER; note = 2'-O-methylcytidine-3'-phosphorothioate
  modified_base 23: mod_base = OTHER; note = 2'-O-methyluridine
tctttctttataaactagtagct

SEQ ID NO: 290 - RNA, 23 nt, synthetic construct
  source 1..23: mol_type = other RNA
  modified_base 1: mod_base = OTHER; note = 2'-O-methyluridine-3'-phosphorothioate 5'-(E)-Vinylphosphonate
  modified_base 2: mod_base = OTHER; note = 2'-deoxy-2'-fluoroadenosine-3'-phosphorothioate
  modified_base 3: mod_base = OTHER; note = 2'-O-methyladenosine-3'-phosphate
  modified_base 4: mod_base = OTHER; note = 2'-O-methyladenosine-3'-phosphate
  modified_base 5: mod_base = OTHER; note = 2'-O-methylguanosine-3'-phosphate
  modified_base 6: mod_base = OTHER; note = 2'-deoxy-2'-fluoroguanosine-3'-phosphate
  modified_base 7: mod_base = OTHER; note = 2'-O-methyluridine-3'-phosphate
  modified_base 8: mod_base = OTHER; note = 2'-deoxy-2'-fluorocytidine-3'-phosphate
  modified_base 9: mod_base = OTHER; note = 2'-deoxy-2'-fluoroadenosine-3'-phosphate
  modified_base 10: mod_base = OTHER; note = 2'-O-methylcytidine-3'-phosphate
  modified_base 11: mod_base = OTHER; note = 2'-O-methyluridine-3'-phosphate
  modified_base 12: mod_base = OTHER; note = 2'-O-methylguanosine-3'-phosphate
  modified_base 13: mod_base = OTHER; note = 2'-O-methyluridine-3'-phosphate
  modified_base 14: mod_base = OTHER; note = 2'-deoxy-2'-fluoroadenosine-3'-phosphate
  modified_base 15: mod_base = OTHER; note = 2'-O-methylguanosine-3'-phosphate
  modified_base 16: mod_base = OTHER; note = 2'-deoxy-2'-fluoroguanosine-3'-phosphate
  modified_base 17: mod_base = OTHER; note = 2'-O-methyluridine-3'-phosphate
  modified_base 18: mod_base = OTHER; note = 2'-O-methyluridine-3'-phosphate
  modified_base 19: mod_base = OTHER; note = 2'-O-methylcytidine-3'-phosphate
  modified_base 20: mod_base = OTHER; note = 2'-O-methylguanosine-3'-phosphate
  modified_base 21: mod_base = OTHER; note = 2'-O-methylguanosine-3'-phosphorothioate
  modified_base 22: mod_base = OTHER; note = 2'-O-methyladenosine-3'-phosphorothioate
  modified_base 23: mod_base = OTHER; note = 2'-O-methyladenosine
taaaggtcactgtaggttcggaa

SEQ ID NO: 291 - RNA, 23 nt, synthetic construct
  source 1..23: mol_type = other RNA
  modified_base 1: mod_base = OTHER; note = 2'-O-methyluridine-3'-phosphorothioate 5'-(E)-Vinylphosphonate
  modified_base 2: mod_base = OTHER; note = 2'-deoxy-2'-fluorocytidine-3'-phosphorothioate
  modified_base 3: mod_base = OTHER; note = 2'-O-methylcytidine-3'-phosphate
  modified_base 4: mod_base = OTHER; note = 2'-O-methyladenosine-3'-phosphate
  modified_base 5: mod_base = OTHER; note = 2'-O-methyladenosine-3'-phosphate
  modified_base 6: mod_base = OTHER; note = 2'-deoxy-2'-fluorocytidine-3'-phosphate
  modified_base 7: mod_base = OTHER; note = 2'-O-methyluridine-3'-phosphate
  modified_base 8: mod_base = OTHER; note = 2'-deoxy-2'-fluorocytidine-3'-phosphate
  modified_base 9: mod_base = OTHER; note = 2'-deoxy-2'-fluorouridine-3'-phosphate
  modified_base 10: mod_base = OTHER; note = 2'-O-methyluridine-3'-phosphate
  modified_base 11: mod_base = OTHER; note = 2'-O-methyluridine-3'-phosphate
  modified_base 12: mod_base = OTHER; note = 2'-O-methylcytidine-3'-phosphate
  modified_base 13: mod_base = OTHER; note = 2'-O-methyluridine-3'-phosphate
  modified_base 14: mod_base = OTHER; note = 2'-deoxy-2'-fluorouridine-3'-phosphate
  modified_base 15: mod_base = OTHER; note = 2'-O-methyluridine-3'-phosphate
  modified_base 16: mod_base = OTHER; note = 2'-deoxy-2'-fluoroadenosine-3'-phosphate
  modified_base 17: mod_base = OTHER; note = 2'-O-methyluridine-3'-phosphate
  modified_base 18: mod_base = OTHER; note = 2'-O-methyladenosine-3'-phosphate
  modified_base 19: mod_base = OTHER; note = 2'-O-methyladenosine-3'-phosphate
  modified_base 20: mod_base = OTHER; note = 2'-O-methyladenosine-3'-phosphate
  modified_base 21: mod_base = OTHER; note = 2'-O-methylcytidine-3'-phosphorothioate
  modified_base 22: mod_base = OTHER; note = 2'-O-methyluridine-3'-phosphorothioate
  modified_base 23: mod_base = OTHER; note = 2'-O-methyladenosine
tccaactctttctttataaacta

SEQ ID NO: 292 - RNA, 23 nt, synthetic construct
  source 1..23: mol_type = other RNA
  modified_base 1: mod_base = OTHER; note = 2'-O-methyluridine-3'-phosphorothioate 5'-(E)-Vinylphosphonate
  modified_base 2: mod_base = OTHER; note = 2'-deoxy-2'-fluoroadenosine-3'-phosphorothioate
  modified_base 3: mod_base = OTHER; note = 2'-O-methylcytidine-3'-phosphate
  modified_base 4: mod_base = OTHER; note = 2'-O-methyluridine-3'-phosphate
  modified_base 5: mod_base = OTHER; note = 2'-O-methylcytidine-3'-phosphate
  modified_base 6: mod_base = OTHER; note = 2'-deoxy-2'-fluorouridine-3'-phosphate
  modified_base 7: mod_base = OTHER; note = 2'-O-methylcytidine-3'-phosphate
  modified_base 8: mod_base = OTHER; note = 2'-deoxy-2'-fluorocytidine-3'-phosphate
  modified_base 9: mod_base = OTHER; note = 2'-deoxy-2'-fluoroadenosine-3'-phosphate
  modified_base 10: mod_base = OTHER; note = 2'-O-methyladenosine-3'-phosphate
  modified_base 11: mod_base = OTHER; note = 2'-O-methylcytidine-3'-phosphate
  modified_base 12: mod_base = OTHER; note = 2'-O-methyluridine-3'-phosphate
  modified_base 13: mod_base = OTHER; note = 2'-O-methylcytidine-3'-phosphate
  modified_base 14: mod_base = OTHER; note = 2'-deoxy-2'-fluorouridine-3'-phosphate
  modified_base 15: mod_base = OTHER; note = 2'-O-methyluridine-3'-phosphate
  modified_base 16: mod_base = OTHER; note = 2'-deoxy-2'-fluorouridine-3'-phosphate
  modified_base 17: mod_base = OTHER; note = 2'-O-methylcytidine-3'-phosphate
  modified_base 18: mod_base = OTHER; note = 2'-O-methyluridine-3'-phosphate
  modified_base 19: mod_base = OTHER; note = 2'-O-methyluridine-3'-phosphate
  modified_base 20: mod_base = OTHER; note = 2'-O-methyluridine-3'-phosphate
  modified_base 21: mod_base = OTHER; note = 2'-O-methyladenosine-3'-phosphorothioate
  modified_base 22: mod_base = OTHER; note = 2'-O-methyluridine-3'-phosphorothioate
  modified_base 23: mod_base = OTHER; note = 2'-O-methyladenosine
tactctccaactctttctttata

SEQ ID NO: 293 - RNA, 23 nt, synthetic construct
  source 1..23: mol_type = other RNA
  modified_base 1: mod_base = OTHER; note = 2'-O-methyluridine-3'-phosphorothioate 5'-(E)-Vinylphosphonate
  modified_base 2: mod_base = OTHER; note = 2'-deoxy-2'-fluorouridine-3'-phosphorothioate
  modified_base 3: mod_base = OTHER; note = 2'-O-methyladenosine-3'-phosphate
  modified_base 4: mod_base = OTHER; note = 2'-O-methyluridine-3'-phosphate
  modified_base 5: mod_base = OTHER; note = 2'-O-methyladenosine-3'-phosphate
  modified_base 6: mod_base = OTHER; note = 2'-deoxy-2'-fluoroguanosine-3'-phosphate
  modified_base 7: mod_base = OTHER; note = 2'-O-methyladenosine-3'-phosphate
  modified_base 8: mod_base = OTHER; note = 2'-deoxy-2'-fluorocytidine-3'-phosphate
  modified_base 9: mod_base = OTHER; note = 2'-deoxy-2'-fluorouridine-3'-phosphate
  modified_base 10: mod_base = OTHER; note = 2'-O-methyladenosine-3'-phosphate
  modified_base 11: mod_base = OTHER; note = 2'-O-methyluridine-3'-phosphate
  modified_base 12: mod_base = OTHER; note = 2'-O-methyladenosine-3'-phosphate
  modified_base 13: mod_base = OTHER; note = 2'-O-methylcytidine-3'-phosphate
  modified_base 14: mod_base = OTHER; note = 2'-deoxy-2'-fluorouridine-3'-phosphate
  modified_base 15: mod_base = OTHER; note = 2'-O-methylcytidine-3'-phosphate
  modified_base 16: mod_base = OTHER; note = 2'-deoxy-2'-fluorouridine-3'-phosphate
  modified_base 17: mod_base = OTHER; note = 2'-O-methylcytidine-3'-phosphate
  modified_base 18: mod_base = OTHER; note = 2'-O-methylcytidine-3'-phosphate
  modified_base 19: mod_base = OTHER; note = 2'-O-methyladenosine-3'-phosphate
  modified_base 20: mod_base = OTHER; note = 2'-O-methyladenosine-3'-phosphate
  modified_base 21: mod_base = OTHER; note = 2'-O-methylcytidine-3'-phosphorothioate
  modified_base 22: mod_base = OTHER; note = 2'-O-methyluridine-3'-phosphorothioate
  modified_base 23: mod_base = OTHER; note = 2'-O-methylcytidine
ttatagactatactctccaactc

SEQ ID NO: 294 - RNA, 23 nt, synthetic construct
  source 1..23: mol_type = other RNA
  modified_base 1: mod_base = OTHER; note = 2'-O-methyluridine-3'-phosphorothioate 5'-(E)-Vinylphosphonate
  modified_base 2: mod_base = OTHER; note = 2'-deoxy-2'-fluorouridine-3'-phosphorothioate
  modified_base 3: mod_base = OTHER; note = 2'-O-methylcytidine-3'-phosphate
  modified_base 4: mod_base = OTHER; note = 2'-O-methylcytidine-3'-phosphate
  modified_base 5: mod_base = OTHER; note = 2'-O-methyladenosine-3'-phosphate
  modified_base 6: mod_base = OTHER; note = 2'-deoxy-2'-fluoroadenosine-3'-phosphate
  modified_base 7: mod_base = OTHER; note = 2'-O-methyluridine-3'-phosphate
  modified_base 8: mod_base = OTHER; note = 2'-deoxy-2'-fluoroguanosine-3'-phosphate
  modified_base 9: mod_base = OTHER; note = 2'-deoxy-2'-fluorouridine-3'-phosphate
  modified_base 10: mod_base = OTHER; note = 2'-O-methyladenosine-3'-phosphate
  modified_base 11: mod_base = OTHER; note = 2'-O-methyluridine-3'-phosphate
  modified_base 12: mod_base = OTHER; note = 2'-O-methyladenosine-3'-phosphate
  modified_base 13: mod_base = OTHER; note = 2'-O-methylguanosine-3'-phosphate
  modified_base 14: mod_base = OTHER; note = 2'-deoxy-2'-fluoroadenosine-3'-phosphate
  modified_base 15: mod_base = OTHER; note = 2'-O-methylcytidine-3'-phosphate
  modified_base 16: mod_base = OTHER; note = 2'-deoxy-2'-fluorouridine-3'-phosphate
  modified_base 17: mod_base = OTHER; note = 2'-O-methyladenosine-3'-phosphate
  modified_base 18: mod_base = OTHER; note = 2'-O-methyluridine-3'-phosphate
  modified_base 19: mod_base = OTHER; note = 2'-O-methyladenosine-3'-phosphate
  modified_base 20: mod_base = OTHER; note = 2'-O-methylcytidine-3'-phosphate
  modified_base 21: mod_base = OTHER; note = 2'-O-methyluridine-3'-phosphorothioate
  modified_base 22: mod_base = OTHER; note = 2'-O-methylcytidine-3'-phosphorothioate
  modified_base 23: mod_base = OTHER; note = 2'-O-methyluridine
ttccaatgtatagactatactct

SEQ ID NO: 295 - RNA, 23 nt, synthetic construct
  source 1..23: mol_type = other RNA
  modified_base 1: mod_base = OTHER; note = 2'-O-methyluridine-3'-phosphorothioate 5'-(E)-Vinylphosphonate
  modified_base 2: mod_base = OTHER; note = 2'-deoxy-2'-fluoroguanosine-3'-phosphorothioate
  modified_base 3: mod_base = OTHER; note = 2'-O-methyluridine-3'-phosphate
  modified_base 4: mod_base = OTHER; note = 2'-O-methylcytidine-3'-phosphate
  modified_base 5: mod_base = OTHER; note = 2'-O-methyluridine-3'-phosphate
  modified_base 6: mod_base = OTHER; note = 2'-deoxy-2'-fluorouridine-3'-phosphate
  modified_base 7: mod_base = OTHER; note = 2'-O-methylcytidine-3'-phosphate
  modified_base 8: mod_base = OTHER; note = 2'-deoxy-2'-fluorocytidine-3'-phosphate
  modified_base 9: mod_base = OTHER; note = 2'-deoxy-2'-fluoroadenosine-3'-phosphate
  modified_base 10: mod_base = OTHER; note = 2'-O-methyladenosine-3'-phosphate
  modified_base 11: mod_base = OTHER; note = 2'-O-methyluridine-3'-phosphate
  modified_base 12: mod_base = OTHER; note = 2'-O-methylguanosine-3'-phosphate
  modified_base 13: mod_base = OTHER; note = 2'-O-methyluridine-3'-phosphate
  modified_base 14: mod_base = OTHER; note = 2'-deoxy-2'-fluoroadenosine-3'-phosphate
  modified_base 15: mod_base = OTHER; note = 2'-O-methyluridine-3'-phosphate
  modified_base 16: mod_base = OTHER; note = 2'-deoxy-2'-fluoroadenosine-3'-phosphate
  modified_base 17: mod_base = OTHER; note = 2'-O-methylguanosine-3'-phosphate
  modified_base 18: mod_base = OTHER; note = 2'-O-methyladenosine-3'-phosphate
  modified_base 19: mod_base = OTHER; note = 2'-O-methylcytidine-3'-phosphate
  modified_base 20: mod_base = OTHER; note = 2'-O-methyluridine-3'-phosphate
  modified_base 21: mod_base = OTHER; note = 2'-O-methyladenosine-3'-phosphorothioate
  modified_base 22: mod_base = OTHER; note = 2'-O-methyluridine-3'-phosphorothioate
  modified_base 23: mod_base = OTHER; note = 2'-O-methyladenosine
tgtcttccaatgtatagactata

SEQ ID NO: 296 - RNA, 23 nt, synthetic construct
  source 1..23: mol_type = other RNA
  modified_base 1: mod_base = OTHER; note = 2'-O-methyluridine-3'-phosphorothioate 5'-(E)-Vinylphosphonate
  modified_base 2: mod_base = OTHER; note = 2'-deoxy-2'-fluoroadenosine-3'-phosphorothioate
  modified_base 3: mod_base = OTHER; note = 2'-O-methylcytidine-3'-phosphate
  modified_base 4: mod_base = OTHER; note = 2'-O-methyluridine-3'-phosphate
  modified_base 5: mod_base = OTHER; note = 2'-O-methylguanosine-3'-phosphate
  modified_base 6: mod_base = OTHER; note = 2'-deoxy-2'-fluorouridine-3'-phosphate
  modified_base 7: mod_base = OTHER; note = 2'-O-methyladenosine-3'-phosphate
  modified_base 8: mod_base = OTHER; note = 2'-deoxy-2'-fluoroguanosine-3'-phosphate
  modified_base 9: mod_base = OTHER; note = 2'-deoxy-2'-fluoroguanosine-3'-phosphate
  modified_base 10: mod_base = OTHER; note = 2'-O-methyladenosine-3'-phosphate
  modified_base 11: mod_base = OTHER; note = 2'-O-methylguanosine-3'-phosphate
  modified_base 12: mod_base = OTHER; note = 2'-O-methyladenosine-3'-phosphate
  modified_base 13: mod_base = OTHER; note = 2'-O-methyladenosine-3'-phosphate
  modified_base 14: mod_base = OTHER; note = 2'-deoxy-2'-fluoroadenosine-3'-phosphate
  modified_base 15: mod_base = OTHER; note = 2'-O-methyladenosine-3'-phosphate
  modified_base 16: mod_base = OTHER; note = 2'-deoxy-2'-fluoroguanosine-3'-phosphate
  modified_base 17: mod_base = OTHER; note = 2'-O-methyladenosine-3'-phosphate
  modified_base 18: mod_base = OTHER; note = 2'-O-methylcytidine-3'-phosphate
  modified_base 19: mod_base = OTHER; note = 2'-O-methyluridine-3'-phosphate
  modified_base 20: mod_base = OTHER; note = 2'-O-methylcytidine-3'-phosphate
  modified_base 21: mod_base = OTHER; note = 2'-O-methyluridine-3'-phosphorothioate
  modified_base 22: mod_base = OTHER; note = 2'-O-methylguanosine-3'-phosphorothioate
  modified_base 23: mod_base = OTHER; note = 2'-O-methyladenosine
tactgtaggagaaaagactctga

SEQ ID NO: 297 - RNA, 23 nt, synthetic construct
  source 1..23: mol_type = other RNA
  modified_base 1: mod_base = OTHER; note = 2'-O-methyluridine-3'-phosphorothioate 5'-(E)-Vinylphosphonate
  modified_base 2: mod_base = OTHER; note = 2'-deoxy-2'-fluoroadenosine-3'-phosphorothioate
  modified_base 3: mod_base = OTHER; note = 2'-O-methylcytidine-3'-phosphate
  modified_base 4: mod_base = OTHER; note = 2'-O-methyluridine-3'-phosphate
  modified_base 5: mod_base = OTHER; note = 2'-O-methyluridine-3'-phosphate
  modified_base 6: mod_base = OTHER; note = 2'-deoxy-2'-fluorouridine-3'-phosphate
  modified_base 7: mod_base = OTHER; note = 2'-O-methylguanosine-3'-phosphate
  modified_base 8: mod_base = OTHER; note = 2'-deoxy-2'-fluorouridine-3'-phosphate
  modified_base 9: mod_base = OTHER; note = 2'-deoxy-2'-fluoroguanosine-3'-phosphate
  modified_base 10: mod_base = OTHER; note = 2'-O-methyluridine-3'-phosphate
  modified_base 11: mod_base = OTHER; note = 2'-O-methylcytidine-3'-phosphate
  modified_base 12: mod_base = OTHER; note = 2'-O-methyluridine-3'-phosphate
  modified_base 13: mod_base = OTHER; note = 2'-O-methyluridine-3'-phosphate
  modified_base 14: mod_base = OTHER; note = 2'-deoxy-2'-fluorocytidine-3'-phosphate
  modified_base 15: mod_base = OTHER; note = 2'-O-methylcytidine-3'-phosphate
  modified_base 16: mod_base = OTHER; note = 2'-deoxy-2'-fluoroadenosine-3'-phosphate
  modified_base 17: mod_base = OTHER; note = 2'-O-methyladenosine-3'-phosphate
  modified_base 18: mod_base = OTHER; note = 2'-O-methyluridine-3'-phosphate
  modified_base 19: mod_base = OTHER; note = 2'-O-methylguanosine-3'-phosphate
  modified_base 20: mod_base = OTHER; note = 2'-O-methyluridine-3'-phosphate
  modified_base 21: mod_base = OTHER; note = 2'-O-methyladenosine-3'-phosphorothioate
  modified_base 22: mod_base = OTHER; note = 2'-O-methyluridine-3'-phosphorothioate
  modified_base 23: mod_base = OTHER; note = 2'-O-methyladenosine
tactttgtgtcttccaatgtata

SEQ ID NO: 298 - RNA, 23 nt, synthetic construct
  source 1..23: mol_type = other RNA
  modified_base 1: mod_base = OTHER; note = 2'-O-methyluridine-3'-phosphorothioate 5'-(E)-Vinylphosphonate
  modified_base 2: mod_base = OTHER; note = 2'-deoxy-2'-fluorouridine-3'-phosphorothioate
  modified_base 3: mod_base = OTHER; note = 2'-O-methylguanosine-3'-phosphate
  modified_base 4: mod_base = OTHER; note = 2'-O-methyluridine-3'-phosphate
  modified_base 5: mod_base = OTHER; note = 2'-O-methyladenosine-3'-phosphate
  modified_base 6: mod_base = OTHER; note = 2'-deoxy-2'-fluoroadenosine-3'-phosphate
  modified_base 7: mod_base = OTHER; note = 2'-O-methylcytidine-3'-phosphate
  modified_base 8: mod_base = OTHER; note = 2'-deoxy-2'-fluorouridine-3'-phosphate
  modified_base 9: mod_base = OTHER; note = 2'-deoxy-2'-fluorouridine-3'-phosphate
  modified_base 10: mod_base = OTHER; note = 2'-O-methyluridine-3'-phosphate
  modified_base 11: mod_base = OTHER; note = 2'-O-methylguanosine-3'-phosphate
  modified_base 12: mod_base = OTHER; note = 2'-O-methyluridine-3'-phosphate
  modified_base 13: mod_base = OTHER; note = 2'-O-methylguanosine-3'-phosphate
  modified_base 14: mod_base = OTHER; note = 2'-deoxy-2'-fluorouridine-3'-phosphate
  modified_base 15: mod_base = OTHER; note = 2'-O-methylcytidine-3'-phosphate
  modified_base 16: mod_base = OTHER; note = 2'-deoxy-2'-fluorouridine-3'-phosphate
  modified_base 17: mod_base = OTHER; note = 2'-O-methyluridine-3'-phosphate
  modified_base 18: mod_base = OTHER; note = 2'-O-methylcytidine-3'-phosphate
  modified_base 19: mod_base = OTHER; note = 2'-O-methylcytidine-3'-phosphate
  modified_base 20: mod_base = OTHER; note = 2'-O-methyladenosine-3'-phosphate
  modified_base 21: mod_base = OTHER; note = 2'-O-methyladenosine-3'-phosphorothioate
  modified_base 22: mod_base = OTHER; note = 2'-O-methyluridine-3'-phosphorothioate
  modified_base 23: mod_base = OTHER; note = 2'-O-methylguanosine
ttgtaactttgtgtcttccaatg

SEQ ID NO: 299 - RNA, 23 nt, synthetic construct
  source 1..23: mol_type = other RNA
  modified_base 1: mod_base = OTHER; note = 2'-O-methyluridine-3'-phosphorothioate 5'-(E)-Vinylphosphonate
  modified_base 2: mod_base = OTHER; note = 2'-deoxy-2'-fluorouridine-3'-phosphorothioate
  modified_base 3: mod_base = OTHER; note = 2'-O-methyluridine-3'-phosphate
  modified_base 4: mod_base = OTHER; note = 2'-O-methylguanosine-3'-phosphate
  modified_base 5: mod_base = OTHER; note = 2'-O-methylguanosine-3'-phosphate
  modified_base 6: mod_base = OTHER; note = 2'-deoxy-2'-fluoroadenosine-3'-phosphate
  modified_base 7: mod_base = OTHER; note = 2'-O-methyluridine-3'-phosphate
  modified_base 8: mod_base = OTHER; note = 2'-deoxy-2'-fluoroguanosine-3'-phosphate
  modified_base 9: mod_base = OTHER; note = 2'-deoxy-2'-fluorouridine-3'-phosphate
  modified_base 10: mod_base = OTHER; note = 2'-O-methyladenosine-3'-phosphate
  modified_base 11: mod_base = OTHER; note = 2'-O-methyladenosine-3'-phosphate
  modified_base 12: mod_base = OTHER; note = 2'-O-methylcytidine-3'-phosphate
  modified_base 13: mod_base = OTHER; note = 2'-O-methyluridine-3'-phosphate
  modified_base 14: mod_base = OTHER; note = 2'-deoxy-2'-fluorouridine-3'-phosphate
  modified_base 15: mod_base = OTHER; note = 2'-O-methyluridine-3'-phosphate
  modified_base 16: mod_base = OTHER; note = 2'-deoxy-2'-fluoroguanosine-3'-phosphate
  modified_base 17: mod_base = OTHER; note = 2'-O-methyluridine-3'-phosphate
  modified_base 18: mod_base = OTHER; note = 2'-O-methylguanosine-3'-phosphate
  modified_base 19: mod_base = OTHER; note = 2'-O-methyluridine-3'-phosphate
  modified_base 20: mod_base = OTHER; note = 2'-O-methylcytidine-3'-phosphate
  modified_base 21: mod_base = OTHER; note = 2'-O-methyluridine-3'-phosphorothioate
  modified_base 22: mod_base = OTHER; note = 2'-O-methyluridine-3'-phosphorothioate
  modified_base 23: mod_base = OTHER; note = 2'-O-methylcytidine
tttggatgtaactttgtgtcttc

SEQ ID NO: 300 - RNA, 23 nt, synthetic construct
  source 1..23: mol_type = other RNA
  modified_base 1: mod_base = OTHER; note = 2'-O-methyluridine-3'-phosphorothioate 5'-(E)-Vinylphosphonate
  modified_base 2: mod_base = OTHER; note = 2'-deoxy-2'-fluoroadenosine-3'-phosphorothioate
  modified_base 3: mod_base = OTHER; note = 2'-O-methyladenosine-3'-phosphate
  modified_base 4: mod_base = OTHER; note = 2'-O-methylcytidine-3'-phosphate
  modified_base 5: mod_base = OTHER; note = 2'-O-methyluridine-3'-phosphate
  modified_base 6: mod_base = OTHER; note = 2'-deoxy-2'-fluorouridine-3'-phosphate
  modified_base 7: mod_base = OTHER; note = 2'-O-methyluridine-3'-phosphate
  modified_base 8: mod_base = OTHER; note = 2'-deoxy-2'-fluoroguanosine-3'-phosphate
  modified_base 9: mod_base = OTHER; note = 2'-deoxy-2'-fluoroguanosine-3'-phosphate
  modified_base 10: mod_base = OTHER; note = 2'-O-methyladenosine-3'-phosphate
  modified_base 11: mod_base = OTHER; note = 2'-O-methyluridine-3'-phosphate
  modified_base 12: mod_base = OTHER; note = 2'-O-methylguanosine-3'-phosphate
  modified_base 13: mod_base = OTHER; note = 2'-O-methyluridine-3'-phosphate
  modified_base 14: mod_base = OTHER; note = 2'-deoxy-2'-fluoroadenosine-3'-phosphate
  modified_base 15: mod_base = OTHER; note = 2'-O-methyladenosine-3'-phosphate
  modified_base 16: mod_base = OTHER; note = 2'-deoxy-2'-fluorocytidine-3'-phosphate
  modified_base 17: mod_base = OTHER; note = 2'-O-methyluridine-3'-phosphate
  modified_base 18: mod_base = OTHER; note = 2'-O-methyluridine-3'-phosphate
  modified_base 19: mod_base = OTHER; note = 2'-O-methyluridine-3'-phosphate
  modified_base 20: mod_base = OTHER; note = 2'-O-methylguanosine-3'-phosphate
  modified_base 21: mod_base = OTHER; note = 2'-O-methyluridine-3'-phosphorothioate
  modified_base 22: mod_base = OTHER; note = 2'-O-methylguanosine-3'-phosphorothioate
  modified_base 23: mod_base = OTHER; note = 2'-O-methyluridine
taactttggatgtaactttgtgt

SEQ ID NO: 301 - RNA, 23 nt, synthetic construct
  source 1..23: mol_type = other RNA
  modified_base 1: mod_base = OTHER; note = 2'-O-methyluridine-3'-phosphorothioate 5'-(E)-Vinylphosphonate
  modified_base 2: mod_base = OTHER; note = 2'-deoxy-2'-fluoroguanosine-3'-phosphorothioate
  modified_base 3: mod_base = OTHER; note = 2'-O-methyladenosine-3'-phosphate
  modified_base 4: mod_base = OTHER; note = 2'-O-methyluridine-3'-phosphate
  modified_base 5: mod_base = OTHER; note = 2'-O-methyladenosine-3'-phosphate
  modified_base 6: mod_base = OTHER; note = 2'-deoxy-2'-fluoroadenosine-3'-phosphate
  modified_base 7: mod_base = OTHER; note = 2'-O-methylcytidine-3'-phosphate
  modified_base 8: mod_base = OTHER; note = 2'-deoxy-2'-fluorouridine-3'-phosphate
  modified_base 9: mod_base = OTHER; note = 2'-deoxy-2'-fluorouridine-3'-phosphate
  modified_base 10: mod_base = OTHER; note = 2'-O-methyluridine-3'-phosphate
  modified_base 11: mod_base = OTHER; note = 2'-O-methylguanosine-3'-phosphate
  modified_base 12: mod_base = OTHER; note = 2'-O-methylguanosine-3'-phosphate
  modified_base 13: mod_base = OTHER; note = 2'-O-methyladenosine-3'-phosphate
  modified_base 14: mod_base = OTHER; note = 2'-deoxy-2'-fluorouridine-3'-phosphate
  modified_base 15: mod_base = OTHER; note = 2'-O-methylguanosine-3'-phosphate
  modified_base 16: mod_base = OTHER; note = 2'-deoxy-2'-fluorouridine-3'-phosphate
  modified_base 17: mod_base = OTHER; note = 2'-O-methyladenosine-3'-phosphate
  modified_base 18: mod_base = OTHER; note = 2'-O-methyladenosine-3'-phosphate
  modified_base 19: mod_base = OTHER; note = 2'-O-methylcytidine-3'-phosphate
  modified_base 20: mod_base = OTHER; note = 2'-O-methyluridine-3'-phosphate
  modified_base 21: mod_base = OTHER; note = 2'-O-methyluridine-3'-phosphorothioate
  modified_base 22: mod_base = OTHER; note = 2'-O-methyluridine-3'-phosphorothioate
  modified_base 23: mod_base = OTHER; note = 2'-O-methylguanosine
tgataactttggatgtaactttg

SEQ ID NO: 302 - RNA, 23 nt, synthetic construct
  source 1..23: mol_type = other RNA
  modified_base 1: mod_base = OTHER; note = 2'-O-methyluridine-3'-phosphorothioate 5'-(E)-Vinylphosphonate
  modified_base 2: mod_base = OTHER; note = 2'-deoxy-2'-fluorouridine-3'-phosphorothioate
  modified_base 3: mod_base = OTHER; note = 2'-O-methyluridine-3'-phosphate
  modified_base 4: mod_base = OTHER; note = 2'-O-methyluridine-3'-phosphate
  modified_base 5: mod_base = OTHER; note = 2'-O-methylcytidine-3'-phosphate
  modified_base 6: mod_base = OTHER; note = 2'-deoxy-2'-fluoroguanosine-3'-phosphate
  modified_base 7: mod_base = OTHER; note = 2'-O-methyladenosine-3'-phosphate
  modified_base 8: mod_base = OTHER; note = 2'-deoxy-2'-fluorouridine-3'-phosphate
  modified_base 9: mod_base = OTHER; note = 2'-deoxy-2'-fluoroadenosine-3'-phosphate
  modified_base 10: mod_base = OTHER; note = 2'-O-methyladenosine-3'-phosphate
  modified_base 11: mod_base = OTHER; note = 2'-O-methylcytidine-3'-phosphate
  modified_base 12: mod_base = OTHER; note = 2'-O-methyluridine-3'-phosphate
  modified_base 13: mod_base = OTHER; note = 2'-O-methyluridine-3'-phosphate
  modified_base 14: mod_base = OTHER; note = 2'-deoxy-2'-fluorouridine-3'-phosphate
  modified_base 15: mod_base = OTHER; note = 2'-O-methylguanosine-3'-phosphate
  modified_base 16: mod_base = OTHER; note = 2'-deoxy-2'-fluoroguanosine-3'-phosphate
  modified_base 17: mod_base = OTHER; note = 2'-O-methyladenosine-3'-phosphate
  modified_base 18: mod_base = OTHER; note = 2'-O-methyluridine-3'-phosphate
  modified_base 19: mod_base = OTHER; note = 2'-O-methylguanosine-3'-phosphate
  modified_base 20: mod_base = OTHER; note = 2'-O-methyluridine-3'-phosphate
  modified_base 21: mod_base = OTHER; note = 2'-O-methyladenosine-3'-phosphorothioate
  modified_base 22: mod_base = OTHER; note = 2'-O-methyladenosine-3'-phosphorothioate
  modified_base 23: mod_base = OTHER; note = 2'-O-methylcytidine
ttttcgataactttggatgtaac

SEQ ID NO: 303 - RNA, 23 nt, synthetic construct
  source 1..23: mol_type = other RNA
  modified_base 1: mod_base = OTHER; note = 2'-O-methyluridine-3'-phosphorothioate 5'-(E)-Vinylphosphonate
  modified_base 2: mod_base = OTHER; note = 2'-deoxy-2'-fluoroadenosine-3'-phosphorothioate
  modified_base 3: mod_base = OTHER; note = 2'-O-methyladenosine-3'-phosphate
  modified_base 4: mod_base = OTHER; note = 2'-O-methylcytidine-3'-phosphate
  modified_base 5: mod_base = OTHER; note = 2'-O-methyluridine-3'-phosphate
  modified_base 6: mod_base = OTHER; note = 2'-deoxy-2'-fluorouridine-3'-phosphate
  modified_base 7: mod_base = OTHER; note = 2'-O-methyluridine-3'-phosphate
  modified_base 8: mod_base = OTHER; note = 2'-deoxy-2'-fluorouridine-3'-phosphate
  modified_base 9: mod_base = OTHER; note = 2'-deoxy-2'-fluorocytidine-3'-phosphate
  modified_base 10: mod_base = OTHER; note = 2'-O-methylguanosine-3'-phosphate
  modified_base 11: mod_base = OTHER; note = 2'-O-methyladenosine-3'-phosphate
  modified_base 12: mod_base = OTHER; note = 2'-O-methyluridine-3'-phosphate
  modified_base 13: mod_base = OTHER; note = 2'-O-methyladenosine-3'-phosphate
  modified_base 14: mod_base = OTHER; note = 2'-deoxy-2'-fluoroadenosine-3'-phosphate
  modified_base 15: mod_base = OTHER; note = 2'-O-methylcytidine-3'-phosphate
  modified_base 16: mod_base = OTHER; note = 2'-deoxy-2'-fluorouridine-3'-phosphate
  modified_base 17: mod_base = OTHER; note = 2'-O-methyluridine-3'-phosphate
  modified_base 18: mod_base = OTHER; note = 2'-O-methyluridine-3'-phosphate
  modified_base 19: mod_base = OTHER; note = 2'-O-methylguanosine-3'-phosphate
  modified_base 20: mod_base = OTHER; note = 2'-O-methylguanosine-3'-phosphate
  modified_base 21: mod_base = OTHER; note = 2'-O-methyladenosine-3'-phosphorothioate
  modified_base 22: mod_base = OTHER; note = 2'-O-methyluridine-3'-phosphorothioate
  modified_base 23: mod_base = OTHER; note = 2'-O-methylguanosine
taacttttcgataactttggatg

SEQ ID NO: 304 - RNA, 23 nt, synthetic construct
  source 1..23: mol_type = other RNA
  modified_base 1: mod_base = OTHER; note = 2'-O-methyluridine-3'-phosphorothioate 5'-(E)-Vinylphosphonate
  modified_base 2: mod_base = OTHER; note = 2'-deoxy-2'-fluoroadenosine-3'-phosphorothioate
  modified_base 3: mod_base = OTHER; note = 2'-O-methyladenosine-3'-phosphate
  modified_base 4: mod_base = OTHER; note = 2'-O-methyluridine-3'-phosphate
  modified_base 5: mod_base = OTHER; note = 2'-O-methyluridine-3'-phosphate
  modified_base 6: mod_base = OTHER; note = 2'-deoxy-2'-fluoroadenosine-3'-phosphate
  modified_base 7: mod_base = OTHER; note = 2'-O-methylguanosine-3'-phosphate
  modified_base 8: mod_base = OTHER; note = 2'-deoxy-2'-fluorouridine-3'-phosphate
  modified_base 9: mod_base = OTHER; note = 2'-deoxy-2'-fluoroadenosine-3'-phosphate
  modified_base 10: mod_base = OTHER; note = 2'-O-methylguanosine-3'-phosphate
  modified_base 11: mod_base = OTHER; note = 2'-O-methylcytidine-3'-phosphate
  modified_base 12: mod_base = OTHER; note = 2'-O-methyluridine-3'-phosphate
  modified_base 13: mod_base = OTHER; note = 2'-O-methylcytidine-3'-phosphate
  modified_base 14: mod_base = OTHER; note = 2'-deoxy-2'-fluoroadenosine-3'-phosphate
  modified_base 15: mod_base = OTHER; note = 2'-O-methyluridine-3'-phosphate
  modified_base 16: mod_base = OTHER; note = 2'-deoxy-2'-fluorouridine-3'-phosphate
  modified_base 17: mod_base = OTHER; note = 2'-O-methylguanosine-3'-phosphate
  modified_base 18: mod_base = OTHER; note = 2'-O-methyluridine-3'-phosphate
  modified_base 19: mod_base = OTHER; note = 2'-O-methylcytidine-3'-phosphate
  modified_base 20: mod_base = OTHER; note = 2'-O-methyluridine-3'-phosphate
  modified_base 21: mod_base = OTHER; note = 2'-O-methylcytidine-3'-phosphorothioate
  modified_base 22: mod_base = OTHER; note = 2'-O-methyluridine-3'-phosphorothioate
  modified_base 23: mod_base = OTHER; note = 2'-O-methylguanosine
taattagtagctcattgtctctg

SEQ ID NO: 305 - RNA, 23 nt, synthetic construct
  source 1..23: mol_type = other RNA
  modified_base 1: mod_base = OTHER; note = 2'-O-methyluridine-3'-phosphorothioate 5'-(E)-Vinylphosphonate
  modified_base 2: mod_base = OTHER; note = 2'-deoxy-2'-fluoroadenosine-3'-phosphorothioate
  modified_base 3: mod_base = OTHER; note = 2'-O-methyladenosine-3'-phosphate
  modified_base 4: mod_base = OTHER; note = 2'-O-methyladenosine-3'-phosphate
  modified_base 5: mod_base = OTHER; note = 2'-O-methyluridine-3'-phosphate
  modified_base 6: mod_base = OTHER; note = 2'-deoxy-2'-fluorouridine-3'-phosphate
  modified_base 7: mod_base = OTHER; note = 2'-O-methyladenosine-3'-phosphate
  modified_base 8: mod_base = OTHER; note = 2'-deoxy-2'-fluoroguanosine-3'-phosphate
  modified_base 9: mod_base = OTHER; note = 2'-deoxy-2'-fluorouridine-3'-phosphate
  modified_base 10: mod_base = OTHER; note = 2'-O-methyladenosine-3'-phosphate
  modified_base 11: mod_base = OTHER; note = 2'-O-methylguanosine-3'-phosphate
  modified_base 12: mod_base = OTHER; note = 2'-O-methylcytidine-3'-phosphate
  modified_base 13: mod_base = OTHER; note = 2'-O-methyluridine-3'-phosphate
  modified_base 14: mod_base = OTHER; note = 2'-deoxy-2'-fluorocytidine-3'-phosphate
  modified_base 15: mod_base = OTHER; note = 2'-O-methyladenosine-3'-phosphate
  modified_base 16: mod_base = OTHER; note = 2'-deoxy-2'-fluorouridine-3'-phosphate
  modified_base 17: mod_base = OTHER; note = 2'-O-methyluridine-3'-phosphate
  modified_base 18: mod_base = OTHER; note = 2'-O-methylguanosine-3'-phosphate
  modified_base 19: mod_base = OTHER; note = 2'-O-methyluridine-3'-phosphate
  modified_base 20: mod_base = OTHER; note = 2'-O-methylcytidine-3'-phosphate
  modified_base 21: mod_base = OTHER; note = 2'-O-methyluridine-3'-phosphorothioate
  modified_base 22: mod_base = OTHER; note = 2'-O-methylcytidine-3'-phosphorothioate
  modified_base 23: mod_base = OTHER; note = 2'-O-methyluridine
taaattagtagctcattgtctct

SEQ ID NO: 306 - RNA, 23 nt, synthetic construct
  source 1..23: mol_type = other RNA
  modified_base 1: mod_base = OTHER; note = 2'-O-methyluridine-3'-phosphorothioate 5'-(E)-Vinylphosphonate
  modified_base 2: mod_base = OTHER; note = 2'-deoxy-2'-fluorouridine-3'-phosphorothioate
  modified_base 3: mod_base = OTHER; note = 2'-O-methyluridine-3'-phosphate
  modified_base 4: mod_base = OTHER; note = 2'-O-methyladenosine-3'-phosphate
  modified_base 5: mod_base = OTHER; note = 2'-O-methyluridine-3'-phosphate
  modified_base 6: mod_base = OTHER; note = 2'-deoxy-2'-fluoroadenosine-3'-phosphate
  modified_base 7: mod_base = OTHER; note = 2'-O-methyladenosine-3'-phosphate
  modified_base 8: mod_base = OTHER; note = 2'-deoxy-2'-fluoroadenosine-3'-phosphate
  modified_base 9: mod_base = OTHER; note = 2'-deoxy-2'-fluorouridine-3'-phosphate
  modified_base 10: mod_base = OTHER; note = 2'-O-methyluridine-3'-phosphate
  modified_base 11: mod_base = OTHER; note = 2'-O-methyladenosine-3'-phosphate
  modified_base 12: mod_base = OTHER; note = 2'-O-methylguanosine-3'-phosphate
  modified_base 13: mod_base = OTHER; note = 2'-O-methyluridine-3'-phosphate
  modified_base 14: mod_base = OTHER; note = 2'-deoxy-2'-fluoroadenosine-3'-phosphate
  modified_base 15: mod_base = OTHER; note = 2'-O-methylguanosine-3'-phosphate
  modified_base 16: mod_base = OTHER; note = 2'-deoxy-2'-fluorocytidine-3'-phosphate
  modified_base 17: mod_base = OTHER; note = 2'-O-methyluridine-3'-phosphate
  modified_base 18: mod_base = OTHER; note = 2'-O-methylcytidine-3'-phosphate
  modified_base 19: mod_base = OTHER; note = 2'-O-methyladenosine-3'-phosphate
  modified_base 20: mod_base = OTHER; note = 2'-O-methyluridine-3'-phosphate
  modified_base 21: mod_base = OTHER; note = 2'-O-methyluridine-3'-phosphorothioate
  modified_base 22: mod_base = OTHER; note = 2'-O-methylguanosine-3'-phosphorothioate
  modified_base 23: mod_base = OTHER; note = 2'-O-methyluridine
tttataaattagtagctcattgt

SEQ ID NO: 307 - RNA, 23 nt, synthetic construct
  source 1..23: mol_type = other RNA
  modified_base 1: mod_base = OTHER; note = 2'-O-methyluridine-3'-phosphorothioate 5'-(E)-Vinylphosphonate
  modified_base 2: mod_base = OTHER; note = 2'-deoxy-2'-fluorouridine-3'-phosphorothioate
  modified_base 3: mod_base = OTHER; note = 2'-O-methylcytidine-3'-phosphate
  modified_base 4: mod_base = OTHER; note = 2'-O-methyluridine-3'-phosphate
  modified_base 5: mod_base = OTHER; note = 2'-O-methyluridine-3'-phosphate
  modified_base 6: mod_base = OTHER; note = 2'-deoxy-2'-fluorouridine-3'-phosphate
  modified_base 7: mod_base = OTHER; note = 2'-O-methyladenosine-3'-phosphate
  modified_base 8: mod_base = OTHER; note = 2'-deoxy-2'-fluorouridine-3'-phosphate
  modified_base 9: mod_base = OTHER; note = 2'-deoxy-2'-fluoroadenosine-3'-phosphate
  modified_base 10: mod_base = OTHER; note = 2'-O-methyladenosine-3'-phosphate
  modified_base 11: mod_base = OTHER; note = 2'-O-methyladenosine-3'-phosphate
  modified_base 12: mod_base = OTHER; note = 2'-O-methyluridine-3'-phosphate
  modified_base 13: mod_base = OTHER; note = 2'-O-methyluridine-3'-phosphate
  modified_base 14: mod_base = OTHER; note = 2'-deoxy-2'-fluoroadenosine-3'-phosphate
  modified_base 15: mod_base = OTHER; note = 2'-O-methylguanosine-3'-phosphate
  modified_base 16: mod_base = OTHER; note = 2'-deoxy-2'-fluorouridine-3'-phosphate
  modified_base 17: mod_base = OTHER; note = 2'-O-methyladenosine-3'-phosphate
  modified_base 18: mod_base = OTHER; note = 2'-O-methylguanosine-3'-phosphate
  modified_base 19: mod_base = OTHER; note = 2'-O-methylcytidine-3'-phosphate
  modified_base 20: mod_base = OTHER; note = 2'-O-methyluridine-3'-phosphate
  modified_base 21: mod_base = OTHER; note = 2'-O-methylcytidine-3'-phosphorothioate
  modified_base 22: mod_base = OTHER; note = 2'-O-methyladenosine-3'-phosphorothioate
  modified_base 23: mod_base = OTHER; note = 2'-O-methyluridine
ttctttataaattagtagctcat

SEQ ID NO: 308 - RNA, 23 nt, synthetic construct
  source 1..23: mol_type = other RNA
  modified_base 1: mod_base = OTHER; note = 2'-O-methyluridine-3'-phosphorothioate 5'-(E)-Vinylphosphonate
  modified_base 2: mod_base = OTHER; note = 2'-deoxy-2'-fluoroadenosine-3'-phosphorothioate
  modified_base 3: mod_base = OTHER; note = 2'-O-methyluridine-3'-phosphate
  modified_base 4: mod_base = OTHER; note = 2'-O-methyluridine-3'-phosphate
  modified_base 5: mod_base = OTHER; note = 2'-O-methylcytidine-3'-phosphate
  modified_base 6: mod_base = OTHER; note = 2'-deoxy-2'-fluoroadenosine-3'-phosphate
  modified_base 7: mod_base = OTHER; note = 2'-O-methylguanosine-3'-phosphate
  modified_base 8: mod_base = OTHER; note = 2'-deoxy-2'-fluorocytidine-3'-phosphate
  modified_base 9: mod_base = OTHER; note = 2'-deoxy-2'-fluoroadenosine-3'-phosphate
  modified_base 10: mod_base = OTHER; note = 2'-O-methyladenosine-3'-phosphate
  modified_base 11: mod_base = OTHER; note = 2'-O-methyluridine-3'-phosphate
  modified_base 12: mod_base = OTHER; note = 2'-O-methyladenosine-3'-phosphate
  modified_base 13: mod_base = OTHER; note = 2'-O-methylcytidine-3'-phosphate
  modified_base 14: mod_base = OTHER; note = 2'-deoxy-2'-fluorocytidine-3'-phosphate
  modified_base 15: mod_base = OTHER; note = 2'-O-methyluridine-3'-phosphate
  modified_base 16: mod_base = OTHER; note = 2'-deoxy-2'-fluoroguanosine-3'-phosphate
  modified_base 17: mod_base = OTHER; note = 2'-O-methyladenosine-3'-phosphate
  modified_base 18: mod_base = OTHER; note = 2'-O-methyluridine-3'-phosphate
  modified_base 19: mod_base = OTHER; note = 2'-O-methylguanosine-3'-phosphate
  modified_base 20: mod_base = OTHER; note = 2'-O-methyladenosine-3'-phosphate
  modified_base 21: mod_base = OTHER; note = 2'-O-methylguanosine-3'-phosphorothioate
  modified_base 22: mod_base = OTHER; note = 2'-O-methylguanosine-3'-phosphorothioate
  modified_base 23: mod_base = OTHER; note = 2'-O-methyladenosine
tattcagcaatacctgatgagga

SEQ ID NO: 309 - RNA, 23 nt, synthetic construct
  source 1..23: mol_type = other RNA
  modified_base 1: mod_base = OTHER; note = 2'-O-methyluridine-3'-phosphorothioate 5'-(E)-Vinylphosphonate
  modified_base 2: mod_base = OTHER; note = 2'-deoxy-2'-fluorocytidine-3'-phosphorothioate
  modified_base 3: mod_base = OTHER; note = 2'-O-methyladenosine-3'-phosphate
  modified_base 4: mod_base = OTHER; note = 2'-O-methyladenosine-3'-phosphate
  modified_base 5: mod_base = OTHER; note = 2'-O-methyladenosine-3'-phosphate
  modified_base 6: mod_base = OTHER; note = 2'-deoxy-2'-fluoroadenosine-3'-phosphate
  modified_base 7: mod_base = OTHER; note = 2'-O-methyluridine-3'-phosphate
  modified_base 8: mod_base = OTHER; note = 2'-deoxy-2'-fluorouridine-3'-phosphate
  modified_base 9: mod_base = OTHER; note = 2'-deoxy-2'-fluorocytidine-3'-phosphate
  modified_base 10: mod_base = OTHER; note = 2'-O-methyladenosine-3'-phosphate
  modified_base 11: mod_base = OTHER; note = 2'-O-methylguanosine-3'-phosphate
  modified_base 12: mod_base = OTHER; note = 2'-O-methylcytidine-3'-phosphate
  modified_base 13: mod_base = OTHER; note = 2'-O-methyladenosine-3'-phosphate
  modified_base 14: mod_base = OTHER; note = 2'-deoxy-2'-fluoroadenosine-3'-phosphate
  modified_base 15: mod_base = OTHER; note = 2'-O-methyluridine-3'-phosphate
  modified_base 16: mod_base = OTHER; note = 2'-deoxy-2'-fluoroadenosine-3'-phosphate
  modified_base 17: mod_base = OTHER; note = 2'-O-methylcytidine-3'-phosphate
  modified_base 18: mod_base = OTHER; note = 2'-O-methylcytidine-3'-phosphate
  modified_base 19: mod_base = OTHER; note = 2'-O-methyluridine-3'-phosphate
  modified_base 20: mod_base = OTHER; note = 2'-O-methylguanosine-3'-phosphate
  modified_base 21: mod_base = OTHER; note = 2'-O-methyladenosine-3'-phosphorothioate
  modified_base 22: mod_base = OTHER; note = 2'-O-methyluridine-3'-phosphorothioate
  modified_base 23: mod_base = OTHER; note = 2'-O-methylguanosine
tcaaaattcagcaatacctgatg

SEQ ID NO: 310 - RNA, 23 nt, synthetic construct
  source 1..23: mol_type = other RNA
  modified_base 1: mod_base = OTHER; note = 2'-O-methyluridine-3'-phosphorothioate 5'-(E)-Vinylphosphonate
  modified_base 2: mod_base = OTHER; note = 2'-deoxy-2'-fluoroguanosine-3'-phosphorothioate
  modified_base 3: mod_base = OTHER; note = 2'-O-methyladenosine-3'-phosphate
  modified_base 4: mod_base = OTHER; note = 2'-O-methyluridine-3'-phosphate
  modified_base 5: mod_base = OTHER; note = 2'-O-methylcytidine-3'-phosphate
  modified_base 6: mod_base = OTHER; note = 2'-deoxy-2'-fluorocytidine-3'-phosphate
  modified_base 7: mod_base = OTHER; note = 2'-O-methyladenosine-3'-phosphate
  modified_base 8: mod_base = OTHER; note = 2'-deoxy-2'-fluoroadenosine-3'-phosphate
  modified_base 9: mod_base = OTHER; note = 2'-deoxy-2'-fluoroadenosine-3'-phosphate
  modified_base 10: mod_base = OTHER; note = 2'-O-methyladenosine-3'-phosphate
  modified_base 11: mod_base = OTHER; note = 2'-O-methyluridine-3'-phosphate
  modified_base 12: mod_base = OTHER; note = 2'-O-methyluridine-3'-phosphate
  modified_base 13: mod_base = OTHER; note = 2'-O-methylcytidine-3'-phosphate
  modified_base 14: mod_base = OTHER; note = 2'-deoxy-2'-fluoroadenosine-3'-phosphate
  modified_base 15: mod_base = OTHER; note = 2'-O-methylguanosine-3'-phosphate
  modified_base 16: mod_base = OTHER; note = 2'-deoxy-2'-fluorocytidine-3'-phosphate
  modified_base 17: mod_base = OTHER; note = 2'-O-methyladenosine-3'-phosphate
  modified_base 18: mod_base = OTHER; note = 2'-O-methyladenosine-3'-phosphate
  modified_base 19: mod_base = OTHER; note = 2'-O-methyluridine-3'-phosphate
  modified_base 20: mod_base = OTHER; note = 2'-O-methyladenosine-3'-phosphate
  modified_base 21: mod_base = OTHER; note = 2'-O-methylcytidine-3'-phosphorothioate
  modified_base 22: mod_base = OTHER; note = 2'-O-methylcytidine-3'-phosphorothioate
  modified_base 23: mod_base = OTHER; note = 2'-O-methyluridine
tgatccaaaattcagcaatacct

SEQ ID NO: 311 - RNA, 23 nt, synthetic construct
  source 1..23: mol_type = other RNA
  modified_base 1: mod_base = OTHER; note = 2'-O-methyluridine-3'-phosphorothioate 5'-(E)-Vinylphosphonate
  modified_base 2: mod_base = OTHER; note = 2'-deoxy-2'-fluoroadenosine-3'-phosphorothioate
  modified_base 3: mod_base = OTHER; note = 2'-O-methylcytidine-3'-phosphate
  modified_base 4: mod_base = OTHER; note = 2'-O-methyladenosine-3'-phosphate
  modified_base 5: mod_base = OTHER; note = 2'-O-methyladenosine-3'-phosphate
  modified_base 6: mod_base = OTHER; note = 2'-deoxy-2'-fluorouridine-3'-phosphate
  modified_base 7: mod_base = OTHER; note = 2'-O-methylcytidine-3'-phosphate
  modified_base 8: mod_base = OTHER; note = 2'-deoxy-2'-fluorouridine-3'-phosphate
  modified_base 9: mod_base = OTHER; note = 2'-deoxy-2'-fluorouridine-3'-phosphate
  modified_base 10: mod_base = OTHER; note = 2'-O-methylguanosine-3'-phosphate
  modified_base 11: mod_base = OTHER; note = 2'-O-methylguanosine-3'-phosphate
  modified_base 12: mod_base = OTHER; note = 2'-O-methylguanosine-3'-phosphate
  modified_base 13: mod_base = OTHER; note = 2'-O-methylcytidine-3'-phosphate
  modified_base 14: mod_base = OTHER; note = 2'-deoxy-2'-fluorouridine-3'-phosphate
  modified_base 15: mod_base = OTHER; note = 2'-O-methylguanosine-3'-phosphate
  modified_base 16: mod_base = OTHER; note = 2'-deoxy-2'-fluoroadenosine-3'-phosphate
  modified_base 17: mod_base = OTHER; note = 2'-O-methylguanosine-3'-phosphate
  modified_base 18: mod_base = OTHER; note = 2'-O-methylcytidine-3'-phosphate
  modified_base 19: mod_base = OTHER; note = 2'-O-methyluridine-3'-phosphate
  modified_base 20: mod_base = OTHER; note = 2'-O-methyluridine-3'-phosphate
  modified_base 21: mod_base = OTHER; note = 2'-O-methylcytidine-3'-phosphorothioate
  modified_base 22: mod_base = OTHER; note = 2'-O-methyluridine-3'-phosphorothioate
  modified_base 23: mod_base = OTHER; note = 2'-O-methyladenosine
tacaatcttgggctgagcttcta

SEQ ID NO: 312 - RNA, 23 nt, synthetic construct
  source 1..23: mol_type = other RNA
  modified_base 1: mod_base = OTHER; note = 2'-O-methyluridine-3'-phosphorothioate 5'-(E)-Vinylphosphonate
  modified_base 2: mod_base = OTHER; note = 2'-deoxy-2'-fluoroguanosine-3'-phosphorothioate
  modified_base 3: mod_base = OTHER; note = 2'-O-methyladenosine-3'-phosphate
  modified_base 4: mod_base = OTHER; note = 2'-O-methylcytidine-3'-phosphate
  modified_base 5: mod_base = OTHER; note = 2'-O-methylcytidine-3'-phosphate
  modified_base 6: mod_base = OTHER; note = 2'-deoxy-2'-fluorocytidine-3'-phosphate
  modified_base 7: mod_base = OTHER; note = 2'-O-methyladenosine-3'-phosphate
  modified_base 8: mod_base = OTHER; note = 2'-deoxy-2'-fluoroadenosine-3'-phosphate
  modified_base 9: mod_base = OTHER; note = 2'-deoxy-2'-fluoroadenosine-3'-phosphate
  modified_base 10: mod_base = OTHER; note = 2'-O-methyladenosine-3'-phosphate
  modified_base 11: mod_base = OTHER; note = 2'-O-methyluridine-3'-phosphate
  modified_base 12: mod_base = OTHER; note = 2'-O-methyluridine-3'-phosphate
  modified_base 13: mod_base = OTHER; note = 2'-O-methylcytidine-3'-phosphate
  modified_base 14: mod_base = OTHER; note = 2'-deoxy-2'-fluoroadenosine-3'-phosphate
  modified_base 15: mod_base = OTHER; note = 2'-O-methyladenosine-3'-phosphate
  modified_base 16: mod_base = OTHER; note = 2'-deoxy-2'-fluorocytidine-3'-phosphate
  modified_base 17: mod_base = OTHER; note = 2'-O-methyladenosine-3'-phosphate
  modified_base 18: mod_base = OTHER; note = 2'-O-methyladenosine-3'-phosphate
  modified_base 19: mod_base = OTHER; note = 2'-O-methyluridine-3'-phosphate
  modified_base 20: mod_base = OTHER; note = 2'-O-methylguanosine-3'-phosphate
  modified_base 21: mod_base = OTHER; note = 2'-O-methylcytidine-3'-phosphorothioate
  modified_base 22: mod_base = OTHER; note = 2'-O-methylcytidine-3'-phosphorothioate
  modified_base 23: mod_base = OTHER; note = 2'-O-methyladenosine
tgacccaaaattcaacaatgcca

SEQ ID NO: 313 - RNA, 23 nt, synthetic construct
  source 1..23: mol_type = other RNA
  modified_base 1: mod_base = OTHER; note = 2'-O-methyluridine-3'-phosphorothioate 5'-(E)-Vinylphosphonate
  modified_base 2: mod_base = OTHER; note = 2'-deoxy-2'-fluoroadenosine-3'-phosphorothioate
  modified_base 3: mod_base = OTHER; note = 2'-O-methyluridine-3'-phosphate
  modified_base 4: mod_base = OTHER; note = 2'-O-methyluridine-3'-phosphate
  modified_base 5: mod_base = OTHER; note = 2'-O-methylguanosine-3'-phosphate
  modified_base 6: mod_base = OTHER; note = 2'-deoxy-2'-fluoroadenosine-3'-phosphate
  modified_base 7: mod_base = OTHER; note = 2'-O-methylcytidine-3'-phosphate
  modified_base 8: mod_base = OTHER; note = 2'-deoxy-2'-fluorocytidine-3'-phosphate
  modified_base 9: mod_base = OTHER; note = 2'-deoxy-2'-fluorocytidine-3'-phosphate
  modified_base 10: mod_base = OTHER; note = 2'-O-methyladenosine-3'-phosphate
  modified_base 11: mod_base = OTHER; note = 2'-O-methyladenosine-3'-phosphate
  modified_base 12: mod_base = OTHER; note = 2'-O-methyladenosine-3'-phosphate
  modified_base 13: mod_base = OTHER; note = 2'-O-methyladenosine-3'-phosphate
  modified_base 14: mod_base = OTHER; note = 2'-deoxy-2'-fluorouridine-3'-phosphate
  modified_base 15: mod_base = OTHER; note = 2'-O-methyluridine-3'-phosphate
  modified_base 16: mod_base = OTHER; note = 2'-deoxy-2'-fluorocytidine-3'-phosphate
  modified_base 17: mod_base = OTHER; note = 2'-O-methyladenosine-3'-phosphate
  modified_base 18: mod_base = OTHER; note = 2'-O-methyladenosine-3'-phosphate
  modified_base 19: mod_base = OTHER; note = 2'-O-methylcytidine-3'-phosphate
  modified_base 20: mod_base = OTHER; note = 2'-O-methyladenosine-3'-phosphate
  modified_base 21: mod_base = OTHER; note = 2'-O-methyladenosine-3'-phosphorothioate
  modified_base 22: mod_base = OTHER; note = 2'-O-methyluridine-3'-phosphorothioate
  modified_base 23: mod_base = OTHER; note = 2'-O-methylguanosine
tattgacccaaaattcaacaatg

SEQ ID NO: 314 - RNA, 23 nt, synthetic construct
  source 1..23: mol_type = other RNA
  modified_base 1: mod_base = OTHER; note = 2'-O-methyluridine-3'-phosphorothioate 5'-(E)-Vinylphosphonate
  modified_base 2: mod_base = OTHER; note = 2'-deoxy-2'-fluoroadenosine-3'-phosphorothioate
  modified_base 3: mod_base = OTHER; note = 2'-O-methyladenosine-3'-phosphate
  modified_base 4: mod_base = OTHER; note = 2'-O-methyladenosine-3'-phosphate
  modified_base 5: mod_base = OTHER; note = 2'-O-methylcytidine-3'-phosphate
  modified_base 6: mod_base = OTHER; note = 2'-deoxy-2'-fluorouridine-3'-phosphate
  modified_base 7: mod_base = OTHER; note = 2'-O-methyluridine-3'-phosphate
  modified_base 8: mod_base = OTHER; note = 2'-deoxy-2'-fluoroguanosine-3'-phosphate
  modified_base 9: mod_base = OTHER; note = 2'-deoxy-2'-fluorocytidine-3'-phosphate
  modified_base 10: mod_base = OTHER; note = 2'-O-methylcytidine-3'-phosphate
  modified_base 11: mod_base = OTHER; note = 2'-O-methylcytidine-3'-phosphate
  modified_base 12: mod_base = OTHER; note = 2'-O-methylcytidine-3'-phosphate
  modified_base 13: mod_base = OTHER; note = 2'-O-methylcytidine-3'-phosphate
  modified_base 14: mod_base = OTHER; note = 2'-deoxy-2'-fluoroadenosine-3'-phosphate
  modified_base 15: mod_base = OTHER; note = 2'-O-methyluridine-3'-phosphate
  modified_base 16: mod_base = OTHER; note = 2'-deoxy-2'-fluoroadenosine-3'-phosphate
  modified_base 17: mod_base = OTHER; note = 2'-O-methylguanosine-3'-phosphate
  modified_base 18: mod_base = OTHER; note = 2'-O-methylguanosine-3'-phosphate
  modified_base 19: mod_base = OTHER; note = 2'-O-methyladenosine-3'-phosphate
  modified_base 20: mod_base = OTHER; note = 2'-O-methyladenosine-3'-phosphate
  modified_base 21: mod_base = OTHER; note = 2'-O-methyluridine-3'-phosphorothioate
  modified_base 22: mod_base = OTHER; note = 2'-O-methylcytidine-3'-phosphorothioate
  modified_base 23: mod_base = OTHER; note = 2'-O-methylcytidine
taaacttgcccccataggaatcc

SEQ ID NO: 315 - RNA, 23 nt, synthetic construct
  source 1..23: mol_type = other RNA
  modified_base 1: mod_base = OTHER; note = 2'-O-methyluridine-3'-phosphorothioate 5'-(E)-Vinylphosphonate
  modified_base 2: mod_base = OTHER; note = 2'-deoxy-2'-fluoroadenosine-3'-phosphorothioate
  modified_base 3: mod_base = OTHER; note = 2'-O-methyluridine-3'-phosphate
  modified_base 4: mod_base = OTHER; note = 2'-O-methyladenosine-3'-phosphate
  modified_base 5: mod_base = OTHER; note = 2'-O-methylguanosine-3'-phosphate
  modified_base 6: mod_base = OTHER; note = 2'-deoxy-2'-fluoroguanosine-3'-phosphate
  modified_base 7: mod_base = OTHER; note = 2'-O-methylcytidine-3'-phosphate
  modified_base 8: mod_base = OTHER; note = 2'-deoxy-2'-fluoroadenosine-3'-phosphate
  modified_base 9: mod_base = OTHER; note = 2'-deoxy-2'-fluoroguanosine-3'-phosphate
  modified_base 10: mod_base = OTHER; note = 2'-O-methyladenosine-3'-phosphate
  modified_base 11: mod_base = OTHER; note = 2'-O-methylcytidine-3'-phosphate
  modified_base 12: mod_base = OTHER; note = 2'-O-methyladenosine-3'-phosphate
  modified_base 13: mod_base = OTHER; note = 2'-O-methylguanosine-3'-phosphate
  modified_base 14: mod_base = OTHER; note = 2'-deoxy-2'-fluoroguanosine-3'-phosphate
  modified_base 15: mod_base = OTHER; note = 2'-O-methyladenosine-3'-phosphate
  modified_base 16: mod_base = OTHER; note = 2'-deoxy-2'-fluorouridine-3'-phosphate
  modified_base 17: mod_base = OTHER; note = 2'-O-methyladenosine-3'-phosphate
  modified_base 18: mod_base = OTHER; note = 2'-O-methyluridine-3'-phosphate
  modified_base 19: mod_base = OTHER; note = 2'-O-methyluridine-3'-phosphate
  modified_base 20: mod_base = OTHER; note = 2'-O-methyluridine-3'-phosphate
  modified_base 21: mod_base = OTHER; note = 2'-O-methyluridine-3'-phosphorothioate
  modified_base 22: mod_base = OTHER; note = 2'-O-methylcytidine-3'-phosphorothioate
  modified_base 23: mod_base = OTHER; note = 2'-O-methyluridine
tataggcagacaggatattttct

SEQ ID NO: 316 - RNA, 23 nt, synthetic construct
  source 1..23: mol_type = other RNA
  modified_base 1: mod_base = OTHER; note = 2'-O-methyluridine-3'-phosphorothioate 5'-(E)-Vinylphosphonate
  modified_base 2: mod_base = OTHER; note = 2'-deoxy-2'-fluoroguanosine-3'-phosphorothioate
  modified_base 3: mod_base = OTHER; note = 2'-O-methyladenosine-3'-phosphate
  modified_base 4: mod_base = OTHER; note = 2'-O-methyluridine-3'-phosphate
  modified_base 5: mod_base = OTHER; note = 2'-O-methyladenosine-3'-phosphate
  modified_base 6: mod_base = OTHER; note = 2'-deoxy-2'-fluoroguanosine-3'-phosphate
  modified_base 7: mod_base = OTHER; note = 2'-O-methylguanosine-3'-phosphate
  modified_base 8: mod_base = OTHER; note = 2'-deoxy-2'-fluorocytidine-3'-phosphate
  modified_base 9: mod_base = OTHER; note = 2'-deoxy-2'-fluoroadenosine-3'-phosphate
  modified_base 10: mod_base = OTHER; note = 2'-O-methylguanosine-3'-phosphate
  modified_base 11: mod_base = OTHER; note = 2'-O-methyladenosine-3'-phosphate
  modified_base 12: mod_base = OTHER; note = 2'-O-methylcytidine-3'-phosphate
  modified_base 13: mod_base = OTHER; note = 2'-O-methyladenosine-3'-phosphate
  modified_base 14: mod_base = OTHER; note = 2'-deoxy-2'-fluoroguanosine-3'-phosphate
  modified_base 15: mod_base = OTHER; note = 2'-O-methylguanosine-3'-phosphate
  modified_base 16: mod_base = OTHER; note = 2'-deoxy-2'-fluoroadenosine-3'-phosphate
  modified_base 17: mod_base = OTHER; note = 2'-O-methyluridine-3'-phosphate
  modified_base 18: mod_base = OTHER; note = 2'-O-methyladenosine-3'-phosphate
  modified_base 19: mod_base = OTHER; note = 2'-O-methyluridine-3'-phosphate
  modified_base 20: mod_base = OTHER; note = 2'-O-methyluridine-3'-phosphate
  modified_base 21: mod_base = OTHER; note = 2'-O-methyluridine-3'-phosphorothioate
  modified_base 22: mod_base = OTHER; note = 2'-O-methyluridine-3'-phosphorothioate
  modified_base 23: mod_base = OTHER; note = 2'-O-methylcytidine
tgataggcagacaggatattttc

SEQ ID NO: 317 - RNA, 23 nt, synthetic construct
  source 1..23: mol_type = other RNA
  modified_base 1: mod_base = OTHER; note = 2'-O-methyluridine-3'-phosphorothioate 5'-(E)-Vinylphosphonate
  modified_base 2: mod_base = OTHER; note = 2'-deoxy-2'-fluorouridine-3'-phosphorothioate
  modified_base 3: mod_base = OTHER; note = 2'-O-methylguanosine-3'-phosphate
  modified_base 4: mod_base = OTHER; note = 2'-O-methyladenosine-3'-phosphate
  modified_base 5: mod_base = OTHER; note = 2'-O-methyluridine-3'-phosphate
  modified_base 6: mod_base = OTHER; note = 2'-deoxy-2'-fluoroadenosine-3'-phosphate
  modified_base 7: mod_base = OTHER; note = 2'-O-methylguanosine-3'-phosphate
  modified_base 8: mod_base = OTHER; note = 2'-deoxy-2'-fluoroguanosine-3'-phosphate
  modified_base 9: mod_base = OTHER; note = 2'-deoxy-2'-fluorocytidine-3'-phosphate
  modified_base 10: mod_base = OTHER; note = 2'-O-methyladenosine-3'-phosphate
  modified_base 11: mod_base = OTHER; note = 2'-O-methylguanosine-3'-phosphate
  modified_base 12: mod_base = OTHER; note = 2'-O-methyladenosine-3'-phosphate
  modified_base 13: mod_base = OTHER; note = 2'-O-methylcytidine-3'-phosphate
  modified_base 14: mod_base = OTHER; note = 2'-deoxy-2'-fluoroadenosine-3'-phosphate
  modified_base 15: mod_base = OTHER; note = 2'-O-methylguanosine-3'-phosphate
  modified_base 16: mod_base = OTHER; note = 2'-deoxy-2'-fluoroguanosine-3'-phosphate
  modified_base 17: mod_base = OTHER; note = 2'-O-methyladenosine-3'-phosphate
  modified_base 18: mod_base = OTHER; note = 2'-O-methyluridine-3'-phosphate
  modified_base 19: mod_base = OTHER; note = 2'-O-methyladenosine-3'-phosphate
  modified_base 20: mod_base = OTHER; note = 2'-O-methyluridine-3'-phosphate
  modified_base 21: mod_base = OTHER; note = 2'-O-methyluridine-3'-phosphorothioate
  modified_base 22: mod_base = OTHER; note = 2'-O-methyluridine-3'-phosphorothioate
  modified_base 23: mod_base = OTHER; note = 2'-O-methyluridine
ttgataggcagacaggatatttt

SEQ ID NO: 318 - RNA, 23 nt, synthetic construct
  source 1..23: mol_type = other RNA
  modified_base 1: mod_base = OTHER; note = 2'-O-methyluridine-3'-phosphorothioate 5'-(E)-Vinylphosphonate
  modified_base 2: mod_base = OTHER; note = 2'-deoxy-2'-fluoroadenosine-3'-phosphorothioate
  modified_base 3: mod_base = OTHER; note = 2'-O-methyluridine-3'-phosphate
  modified_base 4: mod_base = OTHER; note = 2'-O-methyluridine-3'-phosphate
  modified_base 5: mod_base = OTHER; note = 2'-O-methyluridine-3'-phosphate
  modified_base 6: mod_base = OTHER; note = 2'-deoxy-2'-fluorocytidine-3'-phosphate
  modified_base 7: mod_base = OTHER; note = 2'-O-methyladenosine-3'-phosphate
  modified_base 8: mod_base = OTHER; note = 2'-deoxy-2'-fluorouridine-3'-phosphate
  modified_base 9: mod_base = OTHER; note = 2'-deoxy-2'-fluoroadenosine-3'-phosphate
  modified_base 10: mod_base = OTHER; note = 2'-O-methylguanosine-3'-phosphate
  modified_base 11: mod_base = OTHER; note = 2'-O-methyluridine-3'-phosphate
  modified_base 12: mod_base = OTHER; note = 2'-O-methyluridine-3'-phosphate
  modified_base 13: mod_base = OTHER; note = 2'-O-methylcytidine-3'-phosphate
  modified_base 14: mod_base = OTHER; note = 2'-deoxy-2'-fluoroadenosine-3'-phosphate
  modified_base 15: mod_base = OTHER; note = 2'-O-methylguanosine-3'-phosphate
  modified_base 16: mod_base = OTHER; note = 2'-deoxy-2'-fluoroadenosine-3'-phosphate
  modified_base 17: mod_base = OTHER; note = 2'-O-methylguanosine-3'-phosphate
  modified_base 18: mod_base = OTHER; note = 2'-O-methylcytidine-3'-phosphate
  modified_base 19: mod_base = OTHER; note = 2'-O-methylcytidine-3'-phosphate
  modified_base 20: mod_base = OTHER; note = 2'-O-methyluridine-3'-phosphate
  modified_base 21: mod_base = OTHER; note = 2'-O-methylguanosine-3'-phosphorothioate
  modified_base 22: mod_base = OTHER; note = 2'-O-methylcytidine-3'-phosphorothioate
  modified_base 23: mod_base = OTHER; note = 2'-O-methylcytidine
tatttcatagttcagagcctgcc

SEQ ID NO: 319 - RNA, 23 nt, synthetic construct
  source 1..23: mol_type = other RNA
  modified_base 1: mod_base = OTHER; note = 2'-O-methyluridine-3'-phosphorothioate 5'-(E)-Vinylphosphonate
  modified_base 2: mod_base = OTHER; note = 2'-deoxy-2'-fluoroguanosine-3'-phosphorothioate
  modified_base 3: mod_base = OTHER; note = 2'-O-methyladenosine-3'-phosphate
  modified_base 4: mod_base = OTHER; note = 2'-O-methyluridine-3'-phosphate
  modified_base 5: mod_base = OTHER; note = 2'-O-methyluridine-3'-phosphate
  modified_base 6: mod_base = OTHER; note = 2'-deoxy-2'-fluorouridine-3'-phosphate
  modified_base 7: mod_base = OTHER; note = 2'-O-methylcytidine-3'-phosphate
  modified_base 8: mod_base = OTHER; note = 2'-deoxy-2'-fluoroadenosine-3'-phosphate
  modified_base 9: mod_base = OTHER; note = 2'-deoxy-2'-fluorouridine-3'-phosphate
  modified_base 10: mod_base = OTHER; note = 2'-O-methyladenosine-3'-phosphate
  modified_base 11: mod_base = OTHER; note = 2'-O-methylguanosine-3'-phosphate
  modified_base 12: mod_base = OTHER; note = 2'-O-methyluridine-3'-phosphate
  modified_base 13: mod_base = OTHER; note = 2'-O-methyluridine-3'-phosphate
  modified_base 14: mod_base = OTHER; note = 2'-deoxy-2'-fluorocytidine-3'-phosphate
  modified_base 15: mod_base = OTHER; note = 2'-O-methyladenosine-3'-phosphate
  modified_base 16: mod_base = OTHER; note = 2'-deoxy-2'-fluoroguanosine-3'-phosphate
  modified_base 17: mod_base = OTHER; note = 2'-O-methyladenosine-3'-phosphate
  modified_base 18: mod_base = OTHER; note = 2'-O-methylguanosine-3'-phosphate
  modified_base 19: mod_base = OTHER; note = 2'-O-methylcytidine-3'-phosphate
  modified_base 20: mod_base = OTHER; note = 2'-O-methylcytidine-3'-phosphate
  modified_base 21: mod_base = OTHER; note = 2'-O-methyluridine-3'-phosphorothioate
  modified_base 22: mod_base = OTHER; note = 2'-O-methylguanosine-3'-phosphorothioate
  modified_base 23: mod_base = OTHER; note = 2'-O-methylcytidine
tgatttcatagttcagagcctgc

SEQ ID NO: 320 - RNA, 23 nt, synthetic construct
  source 1..23: mol_type = other RNA
  modified_base 1: mod_base = OTHER; note = 2'-O-methyluridine-3'-phosphorothioate 5'-(E)-Vinylphosphonate
  modified_base 2: mod_base = OTHER; note = 2'-deoxy-2'-fluorouridine-3'-phosphorothioate
  modified_base 3: mod_base = OTHER; note = 2'-O-methylguanosine-3'-phosphate
  modified_base 4: mod_base = OTHER; note = 2'-O-methyladenosine-3'-phosphate
  modified_base 5: mod_base = OTHER; note = 2'-O-methyluridine-3'-phosphate
  modified_base 6: mod_base = OTHER; note = 2'-deoxy-2'-fluorouridine-3'-phosphate
  modified_base 7: mod_base = OTHER; note = 2'-O-methyluridine-3'-phosphate
  modified_base 8: mod_base = OTHER; note = 2'-deoxy-2'-fluorocytidine-3'-phosphate
  modified_base 9: mod_base = OTHER; note = 2'-deoxy-2'-fluoroadenosine-3'-phosphate
  modified_base 10: mod_base = OTHER; note = 2'-O-methyluridine-3'-phosphate
  modified_base 11: mod_base = OTHER; note = 2'-O-methyladenosine-3'-phosphate
  modified_base 12: mod_base = OTHER; note = 2'-O-methylguanosine-3'-phosphate
  modified_base 13: mod_base = OTHER; note = 2'-O-methyluridine-3'-phosphate
  modified_base 14: mod_base = OTHER; note = 2'-deoxy-2'-fluorouridine-3'-phosphate
  modified_base 15: mod_base = OTHER; note = 2'-O-methylcytidine-3'-phosphate
  modified_base 16: mod_base = OTHER; note = 2'-deoxy-2'-fluoroadenosine-3'-phosphate
  modified_base 17: mod_base = OTHER; note = 2'-O-methylguanosine-3'-phosphate
  modified_base 18: mod_base = OTHER; note = 2'-O-methyladenosine-3'-phosphate
  modified_base 19: mod_base = OTHER; note = 2'-O-methylguanosine-3'-phosphate
  modified_base 20: mod_base = OTHER; note = 2'-O-methylcytidine-3'-phosphate
  modified_base 21: mod_base = OTHER; note = 2'-O-methylcytidine-3'-phosphorothioate
  modified_base 22: mod_base = OTHER; note = 2'-O-methyluridine-3'-phosphorothioate
  modified_base 23: mod_base = OTHER; note = 2'-O-methylguanosine
ttgatttcatagttcagagcctg

SEQ ID NO: 321 - RNA, 23 nt, synthetic construct
  source 1..23: mol_type = other RNA
  modified_base 1: mod_base = OTHER; note = 2'-O-methyluridine-3'-phosphorothioate 5'-(E)-Vinylphosphonate
  modified_base 2: mod_base = OTHER; note = 2'-deoxy-2'-fluorocytidine-3'-phosphorothioate
  modified_base 3: mod_base = OTHER; note = 2'-O-methyluridine-3'-phosphate
  modified_base 4: mod_base = OTHER; note = 2'-O-methylguanosine-3'-phosphate
  modified_base 5: mod_base = OTHER; note = 2'-O-methyladenosine-3'-phosphate
  modified_base 6: mod_base = OTHER; note = 2'-deoxy-2'-fluorouridine-3'-phosphate
  modified_base 7: mod_base = OTHER; note = 2'-O-methyluridine-3'-phosphate
  modified_base 8: mod_base = OTHER; note = 2'-deoxy-2'-fluorouridine-3'-phosphate
  modified_base 9: mod_base = OTHER; note = 2'-deoxy-2'-fluorocytidine-3'-phosphate
  modified_base 10: mod_base = OTHER; note = 2'-O-methyladenosine-3'-phosphate
  modified_base 11: mod_base = OTHER; note = 2'-O-methyluridine-3'-phosphate
  modified_base 12: mod_base = OTHER; note = 2'-O-methyladenosine-3'-phosphate
  modified_base 13: mod_base = OTHER; note = 2'-O-methylguanosine-3'-phosphate
  modified_base 14: mod_base = OTHER; note = 2'-deoxy-2'-fluorouridine-3'-phosphate
  modified_base 15: mod_base = OTHER; note = 2'-O-methyluridine-3'-phosphate
  modified_base 16: mod_base = OTHER; note = 2'-deoxy-2'-fluorocytidine-3'-phosphate
  modified_base 17: mod_base = OTHER; note = 2'-O-methyladenosine-3'-phosphate
  modified_base 18: mod_base = OTHER; note = 2'-O-methylguanosine-3'-phosphate
  modified_base 19: mod_base = OTHER; note = 2'-O-methyladenosine-3'-phosphate
  modified_base 20: mod_base = OTHER; note = 2'-O-methylguanosine-3'-phosphate
  modified_base 21: mod_base = OTHER; note = 2'-O-methylcytidine-3'-phosphorothioate
  modified_base 22: mod_base = OTHER; note = 2'-O-methylcytidine-3'-phosphorothioate
  modified_base 23: mod_base = OTHER; note = 2'-O-methyluridine
tctgatttcatagttcagagcct

SEQ ID NO: 322 - RNA, 23 nt, synthetic construct
  source 1..23: mol_type = other RNA
  modified_base 1: mod_base = OTHER; note = 2'-O-methyluridine-3'-phosphorothioate 5'-(E)-Vinylphosphonate
  modified_base 2: mod_base = OTHER; note = 2'-deoxy-2'-fluorouridine-3'-phosphorothioate
  modified_base 3: mod_base = OTHER; note = 2'-O-methyluridine-3'-phosphate
  modified_base 4: mod_base = OTHER; note = 2'-O-methyluridine-3'-phosphate
  modified_base 5: mod_base = OTHER; note = 2'-O-methylguanosine-3'-phosphate
  modified_base 6: mod_base = OTHER; note = 2'-deoxy-2'-fluoroadenosine-3'-phosphate
  modified_base 7: mod_base = OTHER; note = 2'-O-methyluridine-3'-phosphate
  modified_base 8: mod_base = OTHER; note = 2'-deoxy-2'-fluoroguanosine-3'-phosphate
  modified_base 9: mod_base = OTHER; note = 2'-deoxy-2'-fluoroadenosine-3'-phosphate
  modified_base 10: mod_base = OTHER; note = 2'-O-methyluridine-3'-phosphate
  modified_base 11: mod_base = OTHER; note = 2'-O-methylguanosine-3'-phosphate
  modified_base 12: mod_base = OTHER; note = 2'-O-methyladenosine-3'-phosphate
  modified_base 13: mod_base = OTHER; note = 2'-O-methylcytidine-3'-phosphate
  modified_base 14: mod_base = OTHER; note = 2'-deoxy-2'-fluoroadenosine-3'-phosphate
  modified_base 15: mod_base = OTHER; note = 2'-O-methyluridine-3'-phosphate
  modified_base 16: mod_base = OTHER; note = 2'-deoxy-2'-fluoroadenosine-3'-phosphate
  modified_base 17: mod_base = OTHER; note = 2'-O-methyluridine-3'-phosphate
  modified_base 18: mod_base = OTHER; note = 2'-O-methylcytidine-3'-phosphate
  modified_base 19: mod_base = OTHER; note = 2'-O-methylcytidine-3'-phosphate
  modified_base 20: mod_base = OTHER; note = 2'-O-methyluridine-3'-phosphate
  modified_base 21: mod_base = OTHER; note = 2'-O-methylcytidine-3'-phosphorothioate
  modified_base 22: mod_base = OTHER; note = 2'-O-methyluridine-3'-phosphorothioate
  modified_base 23: mod_base = OTHER; note = 2'-O-methylguanosine
ttttgatgatgacatatcctctg

SEQ ID NO: 323 - RNA, 23 nt, synthetic construct
  source 1..23: mol_type = other RNA
  modified_base 1: mod_base = OTHER; note = 2'-O-methyluridine-3'-phosphorothioate 5'-(E)-Vinylphosphonate
  modified_base 2: mod_base = OTHER; note = 2'-deoxy-2'-fluoroadenosine-3'-phosphorothioate
  modified_base 3: mod_base = OTHER; note = 2'-O-methyladenosine-3'-phosphate
  modified_base 4: mod_base = OTHER; note = 2'-O-methylguanosine-3'-phosphate
  modified_base 5: mod_base = OTHER; note = 2'-O-methylguanosine-3'-phosphate
  modified_base 6: mod_base = OTHER; note = 2'-deoxy-2'-fluoroguanosine-3'-phosphate
  modified_base 7: mod_base = OTHER; note = 2'-O-methyluridine-3'-phosphate
  modified_base 8: mod_base = OTHER; note = 2'-deoxy-2'-fluorouridine-3'-phosphate
  modified_base 9: mod_base = OTHER; note = 2'-deoxy-2'-fluorouridine-3'-phosphate
  modified_base 10: mod_base = OTHER; note = 2'-O-methylguanosine-3'-phosphate
  modified_base 11: mod_base = OTHER; note = 2'-O-methyladenosine-3'-phosphate
  modified_base 12: mod_base = OTHER; note = 2'-O-methyluridine-3'-phosphate
  modified_base 13: mod_base = OTHER; note = 2'-O-methylguanosine-3'-phosphate
  modified_base 14: mod_base = OTHER; note = 2'-deoxy-2'-fluoroadenosine-3'-phosphate
  modified_base 15: mod_base = OTHER; note = 2'-O-methyluridine-3'-phosphate
  modified_base 16: mod_base = OTHER; note = 2'-deoxy-2'-fluoroguanosine-3'-phosphate
  modified_base 17: mod_base = OTHER; note = 2'-O-methyladenosine-3'-phosphate
  modified_base 18: mod_base = OTHER; note = 2'-O-methylcytidine-3'-phosphate
  modified_base 19: mod_base = OTHER; note = 2'-O-methyladenosine-3'-phosphate
  modified_base 20: mod_base = OTHER; note = 2'-O-methyluridine-3'-phosphate
  modified_base 21: mod_base = OTHER; note = 2'-O-methyladenosine-3'-phosphorothioate
  modified_base 22: mod_base = OTHER; note = 2'-O-methyluridine-3'-phosphorothioate
  modified_base 23: mod_base = OTHER; note = 2'-O-methylcytidine
taagggtttgatgatgacatatc

SEQ ID NO: 324 - RNA, 23 nt, synthetic construct
  source 1..23: mol_type = other RNA
  modified_base 1: mod_base = OTHER; note = 2'-O-methyluridine-3'-phosphorothioate 5'-(E)-Vinylphosphonate
  modified_base 2: mod_base = OTHER; note = 2'-deoxy-2'-fluoroadenosine-3'-phosphorothioate
  modified_base 3: mod_base = OTHER; note = 2'-O-methylcytidine-3'-phosphate
  modified_base 4: mod_base = OTHER; note = 2'-O-methyladenosine-3'-phosphate
  modified_base 5: mod_base = OTHER; note = 2'-O-methylcytidine-3'-phosphate
  modified_base 6: mod_base = OTHER; note = 2'-deoxy-2'-fluorocytidine-3'-phosphate
  modified_base 7: mod_base = OTHER; note = 2'-O-methyladenosine-3'-phosphate
  modified_base 8: mod_base = OTHER; note = 2'-deoxy-2'-fluoroadenosine-3'-phosphate
  modified_base 9: mod_base = OTHER; note = 2'-deoxy-2'-fluoroguanosine-3'-phosphate
  modified_base 10: mod_base = OTHER; note = 2'-O-methylguanosine-3'-phosphate
  modified_base 11: mod_base = OTHER; note = 2'-O-methylguanosine-3'-phosphate
  modified_base 12: mod_base = OTHER; note = 2'-O-methyluridine-3'-phosphate
  modified_base 13: mod_base = OTHER; note = 2'-O-methyluridine-3'-phosphate
  modified_base 14: mod_base = OTHER; note = 2'-deoxy-2'-fluorouridine-3'-phosphate
  modified_base 15: mod_base = OTHER; note = 2'-O-methylguanosine-3'-phosphate
  modified_base 16: mod_base = OTHER; note = 2'-deoxy-2'-fluoroadenosine-3'-phosphate
  modified_base 17: mod_base = OTHER; note = 2'-O-methyluridine-3'-phosphate
  modified_base 18: mod_base = OTHER; note = 2'-O-methylguanosine-3'-phosphate
  modified_base 19: mod_base = OTHER; note = 2'-O-methyladenosine-3'-phosphate
  modified_base 20: mod_base = OTHER; note = 2'-O-methyluridine-3'-phosphate
  modified_base 21: mod_base = OTHER; note = 2'-O-methylguanosine-3'-phosphorothioate
  modified_base 22: mod_base = OTHER; note = 2'-O-methyladenosine-3'-phosphorothioate
  modified_base 23: mod_base = OTHER; note = 2'-O-methylcytidine
tacaccaagggtttgatgatgac

SEQ ID NO: 325 - RNA, 23 nt, synthetic construct
  source 1..23: mol_type = other RNA
  modified_base 1: mod_base = OTHER; note = 2'-O-methyluridine-3'-phosphorothioate 5'-(E)-Vinylphosphonate
  modified_base 2: mod_base = OTHER; note = 2'-deoxy-2'-fluorocytidine-3'-phosphorothioate
  modified_base 3: mod_base = OTHER; note = 2'-O-methyladenosine-3'-phosphate
  modified_base 4: mod_base = OTHER; note = 2'-O-methyluridine-3'-phosphate
  modified_base 5: mod_base = OTHER; note = 2'-O-methyluridine-3'-phosphate
  modified_base 6: mod_base = OTHER; note = 2'-deoxy-2'-fluorouridine-3'-phosphate
  modified_base 7: mod_base = OTHER; note = 2'-O-methyluridine-3'-phosphate
  modified_base 8: mod_base = OTHER; note = 2'-deoxy-2'-fluorocytidine-3'-phosphate
  modified_base 9: mod_base = OTHER; note = 2'-deoxy-2'-fluoroadenosine-3'-phosphate
  modified_base 10: mod_base = OTHER; note = 2'-O-methyladenosine-3'-phosphate
  modified_base 11: mod_base = OTHER; note = 2'-O-methylguanosine-3'-phosphate
  modified_base 12: mod_base = OTHER; note = 2'-O-methyluridine-3'-phosphate
  modified_base 13: mod_base = OTHER; note = 2'-O-methylguanosine-3'-phosphate
  modified_base 14: mod_base = OTHER; note = 2'-deoxy-2'-fluorocytidine-3'-phosphate
  modified_base 15: mod_base = OTHER; note = 2'-O-methyluridine-3'-phosphate
  modified_base 16: mod_base = OTHER; note = 2'-deoxy-2'-fluorocytidine-3'-phosphate
  modified_base 17: mod_base = OTHER; note = 2'-O-methyluridine-3'-phosphate
  modified_base 18: mod_base = OTHER; note = 2'-O-methylcytidine-3'-phosphate
  modified_base 19: mod_base = OTHER; note = 2'-O-methylguanosine-3'-phosphate
  modified_base 20: mod_base = OTHER; note = 2'-O-methyluridine-3'-phosphate
  modified_base 21: mod_base = OTHER; note = 2'-O-methyluridine-3'-phosphorothioate
  modified_base 22: mod_base = OTHER; note = 2'-O-methylguanosine-3'-phosphorothioate
  modified_base 23: mod_base = OTHER; note = 2'-O-methyladenosine
tcattttcaagtgctctcgttga

SEQ ID NO: 326 - RNA, 23 nt, synthetic construct
  source 1..23: mol_type = other RNA
  modified_base 1: mod_base = OTHER; note = 2'-O-methyluridine-3'-phosphorothioate 5'-(E)-Vinylphosphonate
  modified_base 2: mod_base = OTHER; note = 2'-deoxy-2'-fluorouridine-3'-phosphorothioate
  modified_base 3: mod_base = OTHER; note = 2'-O-methyluridine-3'-phosphate
  modified_base 4: mod_base = OTHER; note = 2'-O-methylcytidine-3'-phosphate
  modified_base 5: mod_base = OTHER; note = 2'-O-methyladenosine-3'-phosphate
  modified_base 6: mod_base = OTHER; note = 2'-deoxy-2'-fluorouridine-3'-phosphate
  modified_base 7: mod_base = OTHER; note = 2'-O-methyluridine-3'-phosphate
  modified_base 8: mod_base = OTHER; note = 2'-deoxy-2'-fluorouridine-3'-phosphate
  modified_base 9: mod_base = OTHER; note = 2'-deoxy-2'-fluorouridine-3'-phosphate
  modified_base 10: mod_base = OTHER; note = 2'-O-methylcytidine-3'-phosphate
  modified_base 11: mod_base = OTHER; note = 2'-O-methyladenosine-3'-phosphate
  modified_base 12: mod_base = OTHER; note = 2'-O-methyladenosine-3'-phosphate
  modified_base 13: mod_base = OTHER; note = 2'-O-methylguanosine-3'-phosphate
  modified_base 14: mod_base = OTHER; note = 2'-deoxy-2'-fluorouridine-3'-phosphate
  modified_base 15: mod_base = OTHER; note = 2'-O-methylguanosine-3'-phosphate
  modified_base 16: mod_base = OTHER; note = 2'-deoxy-2'-fluorocytidine-3'-phosphate
  modified_base 17: mod_base = OTHER; note = 2'-O-methyluridine-3'-phosphate
  modified_base 18: mod_base = OTHER; note = 2'-O-methylcytidine-3'-phosphate
  modified_base 19: mod_base = OTHER; note = 2'-O-methyluridine-3'-phosphate
  modified_base 20: mod_base = OTHER; note = 2'-O-methylcytidine-3'-phosphate
  modified_base 21: mod_base = OTHER; note = 2'-O-methylguanosine-3'-phosphorothioate
  modified_base 22: mod_base = OTHER; note = 2'-O-methyluridine-3'-phosphorothioate
  modified_base 23: mod_base = OTHER; note = 2'-O-methyluridine
tttcattttcaagtgctctcgtt

SEQ ID NO: 327 - RNA, 23 nt, synthetic construct
  source 1..23: mol_type = other RNA
  modified_base 1: mod_base = OTHER; note = 2'-O-methyluridine-3'-phosphorothioate 5'-(E)-Vinylphosphonate
  modified_base 2: mod_base = OTHER; note = 2'-deoxy-2'-fluorouridine-3'-phosphorothioate
  modified_base 3: mod_base = OTHER; note = 2'-O-methylcytidine-3'-phosphate
  modified_base 4: mod_base = OTHER; note = 2'-O-methyladenosine-3'-phosphate
  modified_base 5: mod_base = OTHER; note = 2'-O-methyluridine-3'-phosphate
  modified_base 6: mod_base = OTHER; note = 2'-deoxy-2'-fluorouridine-3'-phosphate
  modified_base 7: mod_base = OTHER; note = 2'-O-methyluridine-3'-phosphate
  modified_base 8: mod_base = OTHER; note = 2'-deoxy-2'-fluorocytidine-3'-phosphate
  modified_base 9: mod_base = OTHER; note = 2'-deoxy-2'-fluoroadenosine-3'-phosphate
  modified_base 10: mod_base = OTHER; note = 2'-O-methyluridine-3'-phosphate
  modified_base 11: mod_base = OTHER; note = 2'-O-methyluridine-3'-phosphate
  modified_base 12: mod_base = OTHER; note = 2'-O-methyluridine-3'-phosphate
  modified_base 13: mod_base = OTHER; note = 2'-O-methyluridine-3'-phosphate
  modified_base 14: mod_base = OTHER; note = 2'-deoxy-2'-fluorocytidine-3'-phosphate
  modified_base 15: mod_base = OTHER; note = 2'-O-methyladenosine-3'-phosphate
  modified_base 16: mod_base = OTHER; note = 2'-deoxy-2'-fluoroadenosine-3'-phosphate
  modified_base 17: mod_base = OTHER; note = 2'-O-methylguanosine-3'-phosphate
  modified_base 18: mod_base = OTHER; note = 2'-O-methyluridine-3'-phosphate
  modified_base 19: mod_base = OTHER; note = 2'-O-methylguanosine-3'-phosphate
  modified_base 20: mod_base = OTHER; note = 2'-O-methylcytidine-3'-phosphate
  modified_base 21: mod_base = OTHER; note = 2'-O-methyluridine-3'-phosphorothioate
  modified_base 22: mod_base = OTHER; note = 2'-O-methylcytidine-3'-phosphorothioate
  modified_base 23: mod_base = OTHER; note = 2'-O-methyluridine
ttcatttcattttcaagtgctct

SEQ ID NO: 328 - RNA, 23 nt, synthetic construct
  source 1..23: mol_type = other RNA
  modified_base 1: mod_base = OTHER; note = 2'-O-methyluridine-3'-phosphorothioate 5'-(E)-Vinylphosphonate
  modified_base 2: mod_base = OTHER; note = 2'-deoxy-2'-fluoroguanosine-3'-phosphorothioate
  modified_base 3: mod_base = OTHER; note = 2'-O-methyluridine-3'-phosphate
  modified_base 4: mod_base = OTHER; note = 2'-O-methylcytidine-3'-phosphate
  modified_base 5: mod_base = OTHER; note = 2'-O-methyladenosine-3'-phosphate
  modified_base 6: mod_base = OTHER; note = 2'-deoxy-2'-fluorouridine-3'-phosphate
  modified_base 7: mod_base = OTHER; note = 2'-O-methyluridine-3'-phosphate
  modified_base 8: mod_base = OTHER; note = 2'-deoxy-2'-fluorouridine-3'-phosphate
  modified_base 9: mod_base = OTHER; note = 2'-deoxy-2'-fluorocytidine-3'-phosphate
  modified_base 10: mod_base = OTHER; note = 2'-O-methyladenosine-3'-phosphate
  modified_base 11: mod_base = OTHER; note = 2'-O-methyluridine-3'-phosphate
  modified_base 12: mod_base = OTHER; note = 2'-O-methyluridine-3'-phosphate
  modified_base 13: mod_base = OTHER; note = 2'-O-methyluridine-3'-phosphate
  modified_base 14: mod_base = OTHER; note = 2'-deoxy-2'-fluorouridine-3'-phosphate
  modified_base 15: mod_base = OTHER; note = 2'-O-methylcytidine-3'-phosphate
  modified_base 16: mod_base = OTHER; note = 2'-deoxy-2'-fluoroadenosine-3'-phosphate
  modified_base 17: mod_base = OTHER; note = 2'-O-methyladenosine-3'-phosphate
  modified_base 18: mod_base = OTHER; note = 2'-O-methylguanosine-3'-phosphate
  modified_base 19: mod_base = OTHER; note = 2'-O-methyluridine-3'-phosphate
  modified_base 20: mod_base = OTHER; note = 2'-O-methylguanosine-3'-phosphate
  modified_base 21: mod_base = OTHER; note = 2'-O-methylcytidine-3'-phosphorothioate
  modified_base 22: mod_base = OTHER; note = 2'-O-methyluridine-3'-phosphorothioate
  modified_base 23: mod_base = OTHER; note = 2'-O-methylcytidine
tgtcatttcattttcaagtgctc

SEQ ID NO: 329 - RNA, 23 nt, synthetic construct
  source 1..23: mol_type = other RNA
  modified_base 1: mod_base = OTHER; note = 2'-O-methyluridine-3'-phosphorothioate 5'-(E)-Vinylphosphonate
  modified_base 2: mod_base = OTHER; note = 2'-deoxy-2'-fluorocytidine-3'-phosphorothioate
  modified_base 3: mod_base = OTHER; note = 2'-O-methyluridine-3'-phosphate
  modified_base 4: mod_base = OTHER; note = 2'-O-methyluridine-3'-phosphate
  modified_base 5: mod_base = OTHER; note = 2'-O-methyladenosine-3'-phosphate
  modified_base 6: mod_base = OTHER; note = 2'-deoxy-2'-fluoroguanosine-3'-phosphate
  modified_base 7: mod_base = OTHER; note = 2'-O-methyladenosine-3'-phosphate
  modified_base 8: mod_base = OTHER; note = 2'-deoxy-2'-fluorocytidine-3'-phosphate
  modified_base 9: mod_base = OTHER; note = 2'-deoxy-2'-fluoroadenosine-3'-phosphate
  modified_base 10: mod_base = OTHER; note = 2'-O-methylguanosine-3'-phosphate
  modified_base 11: mod_base = OTHER; note = 2'-O-methyluridine-3'-phosphate
  modified_base 12: mod_base = OTHER; note = 2'-O-methylcytidine-3'-phosphate
  modified_base 13: mod_base = OTHER; note = 2'-O-methyladenosine-3'-phosphate
  modified_base 14: mod_base = OTHER; note = 2'-deoxy-2'-fluorouridine-3'-phosphate
  modified_base 15: mod_base = OTHER; note = 2'-O-methyluridine-3'-phosphate
  modified_base 16: mod_base = OTHER; note = 2'-deoxy-2'-fluorouridine-3'-phosphate
  modified_base 17: mod_base = OTHER; note = 2'-O-methylcytidine-3'-phosphate
  modified_base 18: mod_base = OTHER; note = 2'-O-methyladenosine-3'-phosphate
  modified_base 19: mod_base = OTHER; note = 2'-O-methyluridine-3'-phosphate
  modified_base 20: mod_base = OTHER; note = 2'-O-methyluridine-3'-phosphate
  modified_base 21: mod_base = OTHER; note = 2'-O-methyluridine-3'-phosphorothioate
  modified_base 22: mod_base = OTHER; note = 2'-O-methyluridine-3'-phosphorothioate
  modified_base 23: mod_base = OTHER; note = 2'-O-methylcytidine
tcttagacagtcatttcattttc

SEQ ID NO: 330 - RNA, 23 nt, synthetic construct
  source 1..23: mol_type = other RNA
  modified_base 1: mod_base = OTHER; note = 2'-O-methyluridine-3'-phosphorothioate 5'-(E)-Vinylphosphonate
  modified_base 2: mod_base = OTHER; note = 2'-deoxy-2'-fluorouridine-3'-phosphorothioate
  modified_base 3: mod_base = OTHER; note = 2'-O-methylcytidine-3'-phosphate
  modified_base 4: mod_base = OTHER; note = 2'-O-methyluridine-3'-phosphate
  modified_base 5: mod_base = OTHER; note = 2'-O-methyluridine-3'-phosphate
  modified_base 6: mod_base = OTHER; note = 2'-deoxy-2'-fluoroadenosine-3'-phosphate
  modified_base 7: mod_base = OTHER; note = 2'-O-methylguanosine-3'-phosphate
  modified_base 8: mod_base = OTHER; note = 2'-deoxy-2'-fluoroadenosine-3'-phosphate
  modified_base 9: mod_base = OTHER; note = 2'-deoxy-2'-fluorocytidine-3'-phosphate
  modified_base 10: mod_base = OTHER; note = 2'-O-methyladenosine-3'-phosphate
  modified_base 11: mod_base = OTHER; note = 2'-O-methylguanosine-3'-phosphate
  modified_base 12: mod_base = OTHER; note = 2'-O-methyluridine-3'-phosphate
  modified_base 13: mod_base = OTHER; note = 2'-O-methylcytidine-3'-phosphate
  modified_base 14: mod_base = OTHER; note = 2'-deoxy-2'-fluoroadenosine-3'-phosphate
  modified_base 15: mod_base = OTHER; note = 2'-O-methyluridine-3'-phosphate
  modified_base 16: mod_base = OTHER; note = 2'-deoxy-2'-fluorouridine-3'-phosphate
  modified_base 17: mod_base = OTHER; note = 2'-O-methyluridine-3'-phosphate
  modified_base 18: mod_base = OTHER; note = 2'-O-methylcytidine-3'-phosphate
  modified_base 19: mod_base = OTHER; note = 2'-O-methyladenosine-3'-phosphate
  modified_base 20: mod_base = OTHER; note = 2'-O-methyluridine-3'-phosphate
  modified_base 21: mod_base = OTHER; note = 2'-O-methyluridine-3'-phosphorothioate
  modified_base 22: mod_base = OTHER; note = 2'-O-methyluridine-3'-phosphorothioate
  modified_base 23: mod_base = OTHER; note = 2'-O-methyluridine
ttcttagacagtcatttcatttt

SEQ ID NO: 331 - RNA, 23 nt, synthetic construct
  source 1..23: mol_type = other RNA
  modified_base 1: mod_base = OTHER; note = 2'-O-methyluridine-3'-phosphorothioate 5'-(E)-Vinylphosphonate
  modified_base 2: mod_base = OTHER; note = 2'-deoxy-2'-fluorouridine-3'-phosphorothioate
  modified_base 3: mod_base = OTHER; note = 2'-O-methylcytidine-3'-phosphate
  modified_base 4: mod_base = OTHER; note = 2'-O-methyluridine-3'-phosphate
  modified_base 5: mod_base = OTHER; note = 2'-O-methylcytidine-3'-phosphate
  modified_base 6: mod_base = OTHER; note = 2'-deoxy-2'-fluorouridine-3'-phosphate
  modified_base 7: mod_base = OTHER; note = 2'-O-methyluridine-3'-phosphate
  modified_base 8: mod_base = OTHER; note = 2'-deoxy-2'-fluoroadenosine-3'-phosphate
  modified_base 9: mod_base = OTHER; note = 2'-deoxy-2'-fluoroguanosine-3'-phosphate
  modified_base 10: mod_base = OTHER; note = 2'-O-methyladenosine-3'-phosphate
  modified_base 11: mod_base = OTHER; note = 2'-O-methylcytidine-3'-phosphate
  modified_base 12: mod_base = OTHER; note = 2'-O-methyladenosine-3'-phosphate
  modified_base 13: mod_base = OTHER; note = 2'-O-methylguanosine-3'-phosphate
  modified_base 14: mod_base = OTHER; note = 2'-deoxy-2'-fluorouridine-3'-phosphate
  modified_base 15: mod_base = OTHER; note = 2'-O-methylcytidine-3'-phosphate
  modified_base 16: mod_base = OTHER; note = 2'-deoxy-2'-fluoroadenosine-3'-phosphate
  modified_base 17: mod_base = OTHER; note = 2'-O-methyluridine-3'-phosphate
  modified_base 18: mod_base = OTHER; note = 2'-O-methyluridine-3'-phosphate
  modified_base 19: mod_base = OTHER; note = 2'-O-methyluridine-3'-phosphate
  modified_base 20: mod_base = OTHER; note = 2'-O-methylcytidine-3'-phosphate
  modified_base 21: mod_base = OTHER; note = 2'-O-methyladenosine-3'-phosphorothioate
  modified_base 22: mod_base = OTHER; note = 2'-O-methyluridine-3'-phosphorothioate
  modified_base 23: mod_base = OTHER; note = 2'-O-methyluridine
ttctcttagacagtcatttcatt

SEQ ID NO: 332 - RNA, 23 nt, synthetic construct
  source 1..23: mol_type = other RNA
  modified_base 1: mod_base = OTHER; note = 2'-O-methyluridine-3'-phosphorothioate 5'-(E)-Vinylphosphonate
  modified_base 2: mod_base = OTHER; note = 2'-deoxy-2'-fluoroadenosine-3'-phosphorothioate
  modified_base 3: mod_base = OTHER; note = 2'-O-methyluridine-3'-phosphate
  modified_base 4: mod_base = OTHER; note = 2'-O-methylcytidine-3'-phosphate
  modified_base 5: mod_base = OTHER; note = 2'-O-methyluridine-3'-phosphate
  modified_base 6: mod_base = OTHER; note = 2'-deoxy-2'-fluorocytidine-3'-phosphate
  modified_base 7: mod_base = OTHER; note = 2'-O-methyluridine-3'-phosphate
  modified_base 8: mod_base = OTHER; note = 2'-deoxy-2'-fluorouridine-3'-phosphate
  modified_base 9: mod_base = OTHER; note = 2'-deoxy-2'-fluoroadenosine-3'-phosphate
  modified_base 10: mod_base = OTHER; note = 2'-O-methylguanosine-3'-phosphate
  modified_base 11: mod_base = OTHER; note = 2'-O-methyladenosine-3'-phosphate
  modified_base 12: mod_base = OTHER; note = 2'-O-methylcytidine-3'-phosphate
  modified_base 13: mod_base = OTHER; note = 2'-O-methyladenosine-3'-phosphate
  modified_base 14: mod_base = OTHER; note = 2'-deoxy-2'-fluoroguanosine-3'-phosphate
  modified_base 15: mod_base = OTHER; note = 2'-O-methyluridine-3'-phosphate
  modified_base 16: mod_base = OTHER; note = 2'-deoxy-2'-fluorocytidine-3'-phosphate
  modified_base 17: mod_base = OTHER; note = 2'-O-methyladenosine-3'-phosphate
  modified_base 18: mod_base = OTHER; note = 2'-O-methyluridine-3'-phosphate
  modified_base 19: mod_base = OTHER; note = 2'-O-methyluridine-3'-phosphate
  modified_base 20: mod_base = OTHER; note = 2'-O-methyluridine-3'-phosphate
  modified_base 21: mod_base = OTHER; note = 2'-O-methylcytidine-3'-phosphorothioate
  modified_base 22: mod_base = OTHER; note = 2'-O-methyladenosine-3'-phosphorothioate
  modified_base 23: mod_base = OTHER; note = 2'-O-methyluridine
tatctcttagacagtcatttcat

SEQ ID NO: 333 - RNA, 23 nt, synthetic construct
  source 1..23: mol_type = other RNA
  modified_base 1: mod_base = OTHER; note = 2'-O-methyluridine-3'-phosphorothioate 5'-(E)-Vinylphosphonate
  modified_base 2: mod_base = OTHER; note = 2'-deoxy-2'-fluoroguanosine-3'-phosphorothioate
  modified_base 3: mod_base = OTHER; note = 2'-O-methyladenosine-3'-phosphate
  modified_base 4: mod_base = OTHER; note = 2'-O-methyluridine-3'-phosphate
  modified_base 5: mod_base = OTHER; note = 2'-O-methylcytidine-3'-phosphate
  modified_base 6: mod_base = OTHER; note = 2'-deoxy-2'-fluorouridine-3'-phosphate
  modified_base 7: mod_base = OTHER; note = 2'-O-methylcytidine-3'-phosphate
  modified_base 8: mod_base = OTHER; note = 2'-deoxy-2'-fluorouridine-3'-phosphate
  modified_base 9: mod_base = OTHER; note = 2'-deoxy-2'-fluorouridine-3'-phosphate
  modified_base 10: mod_base = OTHER; note = 2'-O-methyladenosine-3'-phosphate
  modified_base 11: mod_base = OTHER; note = 2'-O-methylguanosine-3'-phosphate
  modified_base 12: mod_base = OTHER; note = 2'-O-methyladenosine-3'-phosphate
  modified_base 13: mod_base = OTHER; note = 2'-O-methylcytidine-3'-phosphate
  modified_base 14: mod_base = OTHER; note = 2'-deoxy-2'-fluoroadenosine-3'-phosphate
  modified_base 15: mod_base = OTHER; note = 2'-O-methylguanosine-3'-phosphate
  modified_base 16: mod_base = OTHER; note = 2'-deoxy-2'-fluorouridine-3'-phosphate
  modified_base 17: mod_base = OTHER; note = 2'-O-methylcytidine-3'-phosphate
  modified_base 18: mod_base = OTHER; note = 2'-O-methyladenosine-3'-phosphate
  modified_base 19: mod_base = OTHER; note = 2'-O-methyluridine-3'-phosphate
  modified_base 20: mod_base = OTHER; note = 2'-O-methyluridine-3'-phosphate
  modified_base 21: mod_base = OTHER; note = 2'-O-methyluridine-3'-phosphorothioate
  modified_base 22: mod_base = OTHER; note = 2'-O-methylcytidine-3'-phosphorothioate
  modified_base 23: mod_base = OTHER; note = 2'-O-methyladenosine
tgatctcttagacagtcatttca

SEQ ID NO: 334 - RNA, 23 nt, synthetic construct
  source 1..23: mol_type = other RNA
  modified_base 1: mod_base = OTHER; note = 2'-O-methyluridine-3'-phosphorothioate 5'-(E)-Vinylphosphonate
  modified_base 2: mod_base = OTHER; note = 2'-deoxy-2'-fluorouridine-3'-phosphorothioate
  modified_base 3: mod_base = OTHER; note = 2'-O-methyladenosine-3'-phosphate
  modified_base 4: mod_base = OTHER; note = 2'-O-methyladenosine-3'-phosphate
  modified_base 5: mod_base = OTHER; note = 2'-O-methylguanosine-3'-phosphate
  modified_base 6: mod_base = OTHER; note = 2'-deoxy-2'-fluoroadenosine-3'-phosphate
  modified_base 7: mod_base = OTHER; note = 2'-O-methyluridine-3'-phosphate
  modified_base 8: mod_base = OTHER; note = 2'-deoxy-2'-fluorocytidine-3'-phosphate
  modified_base 9: mod_base = OTHER; note = 2'-deoxy-2'-fluorouridine-3'-phosphate
  modified_base 10: mod_base = OTHER; note = 2'-O-methyladenosine-3'-phosphate
  modified_base 11: mod_base = OTHER; note = 2'-O-methylguanosine-3'-phosphate
  modified_base 12: mod_base = OTHER; note = 2'-O-methyluridine-3'-phosphate
  modified_base 13: mod_base = OTHER; note = 2'-O-methyladenosine-3'-phosphate
  modified_base 14: mod_base = OTHER; note = 2'-deoxy-2'-fluorouridine-3'-phosphate
  modified_base 15: mod_base = OTHER; note = 2'-O-methylcytidine-3'-phosphate
  modified_base 16: mod_base = OTHER; note = 2'-deoxy-2'-fluorocytidine-3'-phosphate
  modified_base 17: mod_base = OTHER; note = 2'-O-methyladenosine-3'-phosphate
  modified_base 18: mod_base = OTHER; note = 2'-O-methylguanosine-3'-phosphate
  modified_base 19: mod_base = OTHER; note = 2'-O-methyluridine-3'-phosphate
  modified_base 20: mod_base = OTHER; note = 2'-O-methyluridine-3'-phosphate
  modified_base 21: mod_base = OTHER; note = 2'-O-methylguanosine-3'-phosphorothioate
  modified_base 22: mod_base = OTHER; note = 2'-O-methylcytidine-3'-phosphorothioate
  modified_base 23: mod_base = OTHER; note = 2'-O-methyluridine
ttaagatctagtatccagttgct

SEQ ID NO: 335 - RNA, 23 nt, synthetic construct
  source 1..23: mol_type = other RNA
  modified_base 1: mod_base = OTHER; note = 2'-O-methyluridine-3'-phosphorothioate 5'-(E)-Vinylphosphonate
  modified_base 2: mod_base = OTHER; note = 2'-deoxy-2'-fluorouridine-3'-phosphorothioate
  modified_base 3: mod_base = OTHER; note = 2'-O-methyluridine-3'-phosphate
  modified_base 4: mod_base = OTHER; note = 2'-O-methylcytidine-3'-phosphate
  modified_base 5: mod_base = OTHER; note = 2'-O-methyladenosine-3'-phosphate
  modified_base 6: mod_base = OTHER; note = 2'-deoxy-2'-fluoroadenosine-3'-phosphate
  modified_base 7: mod_base = OTHER; note = 2'-O-methyladenosine-3'-phosphate
  modified_base 8: mod_base = OTHER; note = 2'-deoxy-2'-fluoroguanosine-3'-phosphate
  modified_base 9: mod_base = OTHER; note = 2'-deoxy-2'-fluoroadenosine-3'-phosphate
  modified_base 10: mod_base = OTHER; note = 2'-O-methyladenosine-3'-phosphate
  modified_base 11: mod_base = OTHER; note = 2'-O-methylguanosine-3'-phosphate
  modified_base 12: mod_base = OTHER; note = 2'-O-methyladenosine-3'-phosphate
  modified_base 13: mod_base = OTHER; note = 2'-O-methyladenosine-3'-phosphate
  modified_base 14: mod_base = OTHER; note = 2'-deoxy-2'-fluoroadenosine-3'-phosphate
  modified_base 15: mod_base = OTHER; note = 2'-O-methylguanosine-3'-phosphate
  modified_base 16: mod_base = OTHER; note = 2'-deoxy-2'-fluoroadenosine-3'-phosphate
  modified_base 17: mod_base = OTHER; note = 2'-O-methylguanosine-3'-phosphate
  modified_base 18: mod_base = OTHER; note = 2'-O-methylcytidine-3'-phosphate
  modified_base 19: mod_base = OTHER; note = 2'-O-methyluridine-3'-phosphate
  modified_base 20: mod_base = OTHER; note = 2'-O-methylguanosine-3'-phosphate
  modified_base 21: mod_base = OTHER; note = 2'-O-methylcytidine-3'-phosphorothioate
  modified_base 22: mod_base = OTHER; note = 2'-O-methyladenosine-3'-phosphorothioate
  modified_base 23: mod_base = OTHER; note = 2'-O-methylguanosine
tttcaaagaagaaagagctgcag

SEQ ID NO: 336 - RNA, 23 nt, synthetic construct
  source 1..23: mol_type = other RNA
  modified_base 1: mod_base = OTHER; note = 2'-O-methyluridine-3'-phosphorothioate 5'-(E)-Vinylphosphonate
  modified_base 2: mod_base = OTHER; note = 2'-deoxy-2'-fluoroguanosine-3'-phosphorothioate
  modified_base 3: mod_base = OTHER; note = 2'-O-methyladenosine-3'-phosphate
  modified_base 4: mod_base = OTHER; note = 2'-O-methyladenosine-3'-phosphate
  modified_base 5: mod_base = OTHER; note = 2'-O-methyladenosine-3'-phosphate
  modified_base 6: mod_base = OTHER; note = 2'-deoxy-2'-fluorouridine-3'-phosphate
  modified_base 7: mod_base = OTHER; note = 2'-O-methyluridine-3'-phosphate
  modified_base 8: mod_base = OTHER; note = 2'-deoxy-2'-fluorocytidine-3'-phosphate
  modified_base 9: mod_base = OTHER; note = 2'-deoxy-2'-fluoroadenosine-3'-phosphate
  modified_base 10: mod_base = OTHER; note = 2'-O-methyladenosine-3'-phosphate
  modified_base 11: mod_base = OTHER; note = 2'-O-methyladenosine-3'-phosphate
  modified_base 12: mod_base = OTHER; note = 2'-O-methylguanosine-3'-phosphate
  modified_base 13: mod_base = OTHER; note = 2'-O-methyladenosine-3'-phosphate
  modified_base 14: mod_base = OTHER; note = 2'-deoxy-2'-fluoroadenosine-3'-phosphate
  modified_base 15: mod_base = OTHER; note = 2'-O-methylguanosine-3'-phosphate
  modified_base 16: mod_base = OTHER; note = 2'-deoxy-2'-fluoroadenosine-3'-phosphate
  modified_base 17: mod_base = OTHER; note = 2'-O-methyladenosine-3'-phosphate
  modified_base 18: mod_base = OTHER; note = 2'-O-methyladenosine-3'-phosphate
  modified_base 19: mod_base = OTHER; note = 2'-O-methylguanosine-3'-phosphate
  modified_base 20: mod_base = OTHER; note = 2'-O-methyladenosine-3'-phosphate
  modified_base 21: mod_base = OTHER; note = 2'-O-methylguanosine-3'-phosphorothioate
  modified_base 22: mod_base = OTHER; note = 2'-O-methylcytidine-3'-phosphorothioate
  modified_base 23: mod_base = OTHER; note = 2'-O-methyluridine
tgaaattcaaagaagaaagagct

SEQ ID NO: 337 - RNA, 23 nt, synthetic construct
  source 1..23: mol_type = other RNA
  modified_base 1: mod_base = OTHER; note = 2'-O-methyluridine-3'-phosphorothioate 5'-(E)-Vinylphosphonate
  modified_base 2: mod_base = OTHER; note = 2'-deoxy-2'-fluoroadenosine-3'-phosphorothioate
  modified_base 3: mod_base = OTHER; note = 2'-O-methylguanosine-3'-phosphate
  modified_base 4: mod_base = OTHER; note = 2'-O-methylguanosine-3'-phosphate
  modified_base 5: mod_base = OTHER; note = 2'-O-methyladenosine-3'-phosphate
  modified_base 6: mod_base = OTHER; note = 2'-deoxy-2'-fluoroadenosine-3'-phosphate
  modified_base 7: mod_base = OTHER; note = 2'-O-methyladenosine-3'-phosphate
  modified_base 8: mod_base = OTHER; note = 2'-deoxy-2'-fluorouridine-3'-phosphate
  modified_base 9: mod_base = OTHER; note = 2'-deoxy-2'-fluorouridine-3'-phosphate
  modified_base 10: mod_base = OTHER; note = 2'-O-methylcytidine-3'-phosphate
  modified_base 11: mod_base = OTHER; note = 2'-O-methyladenosine-3'-phosphate
  modified_base 12: mod_base = OTHER; note = 2'-O-methyladenosine-3'-phosphate
  modified_base 13: mod_base = OTHER; note = 2'-O-methyladenosine-3'-phosphate
  modified_base 14: mod_base = OTHER; note = 2'-deoxy-2'-fluoroguanosine-3'-phosphate
  modified_base 15: mod_base = OTHER; note = 2'-O-methyladenosine-3'-phosphate
  modified_base 16: mod_base = OTHER; note = 2'-deoxy-2'-fluoroadenosine-3'-phosphate
  modified_base 17: mod_base = OTHER; note = 2'-O-methylguanosine-3'-phosphate
  modified_base 18: mod_base = OTHER; note = 2'-O-methyladenosine-3'-phosphate
  modified_base 19: mod_base = OTHER; note = 2'-O-methyladenosine-3'-phosphate
  modified_base 20: mod_base = OTHER; note = 2'-O-methyladenosine-3'-phosphate
  modified_base 21: mod_base = OTHER; note = 2'-O-methylguanosine-3'-phosphorothioate
  modified_base 22: mod_base = OTHER; note = 2'-O-methyladenosine-3'-phosphorothioate
  modified_base 23: mod_base = OTHER; note = 2'-O-methylguanosine
taggaaattcaaagaagaaagag

SEQ ID NO: 338 - RNA, 23 nt, synthetic construct
  source 1..23: mol_type = other RNA
  modified_base 1: mod_base = OTHER; note = 2'-O-methyluridine-3'-phosphorothioate 5'-(E)-Vinylphosphonate
  modified_base 2: mod_base = OTHER; note = 2'-deoxy-2'-fluorouridine-3'-phosphorothioate
  modified_base 3: mod_base = OTHER; note = 2'-O-methyladenosine-3'-phosphate
  modified_base 4: mod_base = OTHER; note = 2'-O-methylcytidine-3'-phosphate
  modified_base 5: mod_base = OTHER; note = 2'-O-methyladenosine-3'-phosphate
  modified_base 6: mod_base = OTHER; note = 2'-deoxy-2'-fluoroguanosine-3'-phosphate
  modified_base 7: mod_base = OTHER; note = 2'-O-methyladenosine-3'-phosphate
  modified_base 8: mod_base = OTHER; note = 2'-deoxy-2'-fluorouridine-3'-phosphate
  modified_base 9: mod_base = OTHER; note = 2'-deoxy-2'-fluoroadenosine-3'-phosphate
  modified_base 10: mod_base = OTHER; note = 2'-O-methylguanosine-3'-phosphate
  modified_base 11: mod_base = OTHER; note = 2'-O-methylguanosine-3'-phosphate
  modified_base 12: mod_base = OTHER; note = 2'-O-methyladenosine-3'-phosphate
  modified_base 13: mod_base = OTHER; note = 2'-O-methyladenosine-3'-phosphate
  modified_base 14: mod_base = OTHER; note = 2'-deoxy-2'-fluoroadenosine-3'-phosphate
  modified_base 15: mod_base = OTHER; note = 2'-O-methyluridine-3'-phosphate
  modified_base 16: mod_base = OTHER; note = 2'-deoxy-2'-fluorouridine-3'-phosphate
  modified_base 17: mod_base = OTHER; note = 2'-O-methylcytidine-3'-phosphate
  modified_base 18: mod_base = OTHER; note = 2'-O-methyladenosine-3'-phosphate
  modified_base 19: mod_base = OTHER; note = 2'-O-methyladenosine-3'-phosphate
  modified_base 20: mod_base = OTHER; note = 2'-O-methyladenosine-3'-phosphate
  modified_base 21: mod_base = OTHER; note = 2'-O-methylguanosine-3'-phosphorothioate
  modified_base 22: mod_base = OTHER; note = 2'-O-methyladenosine-3'-phosphorothioate
  modified_base 23: mod_base = OTHER; note = 2'-O-methyladenosine
ttacagataggaaattcaaagaa

SEQ ID NO: 339 - RNA, 23 nt, synthetic construct
  source 1..23: mol_type = other RNA
  modified_base 1: mod_base = OTHER; note = 2'-O-methyluridine-3'-phosphorothioate 5'-(E)-Vinylphosphonate
  modified_base 2: mod_base = OTHER; note = 2'-deoxy-2'-fluoroadenosine-3'-phosphorothioate
  modified_base 3: mod_base = OTHER; note = 2'-O-methyluridine-3'-phosphate
  modified_base 4: mod_base = OTHER; note = 2'-O-methyladenosine-3'-phosphate
  modified_base 5: mod_base = OTHER; note = 2'-O-methylcytidine-3'-phosphate
  modified_base 6: mod_base = OTHER; note = 2'-deoxy-2'-fluoroadenosine-3'-phosphate
  modified_base 7: mod_base = OTHER; note = 2'-O-methylguanosine-3'-phosphate
  modified_base 8: mod_base = OTHER; note = 2'-deoxy-2'-fluoroadenosine-3'-phosphate
  modified_base 9: mod_base = OTHER; note = 2'-deoxy-2'-fluorouridine-3'-phosphate
  modified_base 10: mod_base = OTHER; note = 2'-O-methyladenosine-3'-phosphate
  modified_base 11: mod_base = OTHER; note = 2'-O-methylguanosine-3'-phosphate
  modified_base 12: mod_base = OTHER; note = 2'-O-methylguanosine-3'-phosphate
  modified_base 13: mod_base = OTHER; note = 2'-O-methyladenosine-3'-phosphate
  modified_base 14: mod_base = OTHER; note = 2'-deoxy-2'-fluoroadenosine-3'-phosphate
  modified_base 15: mod_base = OTHER; note = 2'-O-methyladenosine-3'-phosphate
  modified_base 16: mod_base = OTHER; note = 2'-deoxy-2'-fluorouridine-3'-phosphate
  modified_base 17: mod_base = OTHER; note = 2'-O-methyluridine-3'-phosphate
  modified_base 18: mod_base = OTHER; note = 2'-O-methylcytidine-3'-phosphate
  modified_base 19: mod_base = OTHER; note = 2'-O-methyladenosine-3'-phosphate
  modified_base 20: mod_base = OTHER; note = 2'-O-methyladenosine-3'-phosphate
  modified_base 21: mod_base = OTHER; note = 2'-O-methyladenosine-3'-phosphorothioate
  modified_base 22: mod_base = OTHER; note = 2'-O-methylguanosine-3'-phosphorothioate
  modified_base 23: mod_base = OTHER; note = 2'-O-methyladenosine
tatacagataggaaattcaaaga

SEQ ID NO: 340 - RNA, 23 nt, synthetic construct
  source 1..23: mol_type = other RNA
  modified_base 1: mod_base = OTHER; note = 2'-O-methyluridine-3'-phosphorothioate 5'-(E)-Vinylphosphonate
  modified_base 2: mod_base = OTHER; note = 2'-deoxy-2'-fluoroadenosine-3'-phosphorothioate
  modified_base 3: mod_base = OTHER; note = 2'-O-methylcytidine-3'-phosphate
  modified_base 4: mod_base = OTHER; note = 2'-O-methyladenosine-3'-phosphate
  modified_base 5: mod_base = OTHER; note = 2'-O-methyluridine-3'-phosphate
  modified_base 6: mod_base = OTHER; note = 2'-deoxy-2'-fluoroadenosine-3'-phosphate
  modified_base 7: mod_base = OTHER; note = 2'-O-methylcytidine-3'-phosphate
  modified_base 8: mod_base = OTHER; note = 2'-deoxy-2'-fluoroadenosine-3'-phosphate
  modified_base 9: mod_base = OTHER; note = 2'-deoxy-2'-fluoroguanosine-3'-phosphate
  modified_base 10: mod_base = OTHER; note = 2'-O-methyladenosine-3'-phosphate
  modified_base 11: mod_base = OTHER; note = 2'-O-methyluridine-3'-phosphate
  modified_base 12: mod_base = OTHER; note = 2'-O-methyladenosine-3'-phosphate
  modified_base 13: mod_base = OTHER; note = 2'-O-methylguanosine-3'-phosphate
  modified_base 14: mod_base = OTHER; note = 2'-deoxy-2'-fluoroguanosine-3'-phosphate
  modified_base 15: mod_base = OTHER; note = 2'-O-methyladenosine-3'-phosphate
  modified_base 16: mod_base = OTHER; note = 2'-deoxy-2'-fluoroadenosine-3'-phosphate
  modified_base 17: mod_base = OTHER; note = 2'-O-methyladenosine-3'-phosphate
  modified_base 18: mod_base = OTHER; note = 2'-O-methyluridine-3'-phosphate
  modified_base 19: mod_base = OTHER; note = 2'-O-methyluridine-3'-phosphate
  modified_base 20: mod_base = OTHER; note = 2'-O-methylcytidine-3'-phosphate
  modified_base 21: mod_base = OTHER; note = 2'-O-methyladenosine-3'-phosphorothioate
  modified_base 22: mod_base = OTHER; note = 2'-O-methyladenosine-3'-phosphorothioate
  modified_base 23: mod_base = OTHER; note = 2'-O-methyladenosine
tacatacagataggaaattcaaa

SEQ ID NO: 341 - RNA, 23 nt, synthetic construct
  source 1..23: mol_type = other RNA
  modified_base 1: mod_base = OTHER; note = 2'-O-methyluridine-3'-phosphorothioate 5'-(E)-Vinylphosphonate
  modified_base 2: mod_base = OTHER; note = 2'-deoxy-2'-fluoroadenosine-3'-phosphorothioate
  modified_base 3: mod_base = OTHER; note = 2'-O-methylguanosine-3'-phosphate
  modified_base 4: mod_base = OTHER; note = 2'-O-methyladenosine-3'-phosphate
  modified_base 5: mod_base = OTHER; note = 2'-O-methylcytidine-3'-phosphate
  modified_base 6: mod_base = OTHER; note = 2'-deoxy-2'-fluoroadenosine-3'-phosphate
  modified_base 7: mod_base = OTHER; note = 2'-O-methyluridine-3'-phosphate
  modified_base 8: mod_base = OTHER; note = 2'-deoxy-2'-fluoroadenosine-3'-phosphate
  modified_base 9: mod_base = OTHER; note = 2'-deoxy-2'-fluorocytidine-3'-phosphate
  modified_base 10: mod_base = OTHER; note = 2'-O-methyladenosine-3'-phosphate
  modified_base 11: mod_base = OTHER; note = 2'-O-methylguanosine-3'-phosphate
  modified_base 12: mod_base = OTHER; note = 2'-O-methyladenosine-3'-phosphate
  modified_base 13: mod_base = OTHER; note = 2'-O-methyluridine-3'-phosphate
  modified_base 14: mod_base = OTHER; note = 2'-deoxy-2'-fluoroadenosine-3'-phosphate
  modified_base 15: mod_base = OTHER; note = 2'-O-methylguanosine-3'-phosphate
  modified_base 16: mod_base = OTHER; note = 2'-deoxy-2'-fluoroguanosine-3'-phosphate
  modified_base 17: mod_base = OTHER; note = 2'-O-methyladenosine-3'-phosphate
  modified_base 18: mod_base = OTHER; note = 2'-O-methyladenosine-3'-phosphate
  modified_base 19: mod_base = OTHER; note = 2'-O-methyladenosine-3'-phosphate
  modified_base 20: mod_base = OTHER; note = 2'-O-methyluridine-3'-phosphate
  modified_base 21: mod_base = OTHER; note = 2'-O-methyluridine-3'-phosphorothioate
  modified_base 22: mod_base = OTHER; note = 2'-O-methylcytidine-3'-phosphorothioate
  modified_base 23: mod_base = OTHER; note = 2'-O-methyladenosine
tagacatacagataggaaattca

SEQ ID NO: 342 - RNA, 23 nt, synthetic construct
  source 1..23: mol_type = other RNA
  modified_base 1: mod_base = OTHER; note = 2'-O-methyluridine-3'-phosphorothioate 5'-(E)-Vinylphosphonate
  modified_base 2: mod_base = OTHER; note = 2'-deoxy-2'-fluoroadenosine-3'-phosphorothioate
  modified_base 3: mod_base = OTHER; note = 2'-O-methyladenosine-3'-phosphate
  modified_base 4: mod_base = OTHER; note = 2'-O-methyluridine-3'-phosphate
  modified_base 5: mod_base = OTHER; note = 2'-O-methyluridine-3'-phosphate
  modified_base 6: mod_base = OTHER; note = 2'-deoxy-2'-fluoroadenosine-3'-phosphate
  modified_base 7: mod_base = OTHER; note = 2'-O-methylguanosine-3'-phosphate
  modified_base 8: mod_base = OTHER; note = 2'-deoxy-2'-fluoroguanosine-3'-phosphate
  modified_base 9: mod_base = OTHER; note = 2'-deoxy-2'-fluorocytidine-3'-phosphate
  modified_base 10: mod_base = OTHER; note = 2'-O-methyladenosine-3'-phosphate
  modified_base 11: mod_base = OTHER; note = 2'-O-methylguanosine-3'-phosphate
  modified_base 12: mod_base = OTHER; note = 2'-O-methyladenosine-3'-phosphate
  modified_base 13: mod_base = OTHER; note = 2'-O-methylcytidine-3'-phosphate
  modified_base 14: mod_base = OTHER; note = 2'-deoxy-2'-fluoroadenosine-3'-phosphate
  modified_base 15: mod_base = OTHER; note = 2'-O-methyluridine-3'-phosphate
  modified_base 16: mod_base = OTHER; note = 2'-deoxy-2'-fluoroadenosine-3'-phosphate
  modified_base 17: mod_base = OTHER; note = 2'-O-methylcytidine-3'-phosphate
  modified_base 18: mod_base = OTHER; note = 2'-O-methyladenosine-3'-phosphate
  modified_base 19: mod_base = OTHER; note = 2'-O-methylguanosine-3'-phosphate
  modified_base 20: mod_base = OTHER; note = 2'-O-methyladenosine-3'-phosphate
  modified_base 21: mod_base = OTHER; note = 2'-O-methyluridine-3'-phosphorothioate
  modified_base 22: mod_base = OTHER; note = 2'-O-methyladenosine-3'-phosphorothioate
  modified_base 23: mod_base = OTHER; note = 2'-O-methylguanosine
taattaggcagacatacagatag

SEQ ID NO: 343 - RNA, 23 nt, synthetic construct
  source 1..23: mol_type = other RNA
  modified_base 1: mod_base = OTHER; note = 2'-O-methyluridine-3'-phosphorothioate 5'-(E)-Vinylphosphonate
  modified_base 2: mod_base = OTHER; note = 2'-deoxy-2'-fluorouridine-3'-phosphorothioate
  modified_base 3: mod_base = OTHER; note = 2'-O-methyluridine-3'-phosphate
  modified_base 4: mod_base = OTHER; note = 2'-O-methyluridine-3'-phosphate
  modified_base 5: mod_base = OTHER; note = 2'-O-methyladenosine-3'-phosphate
  modified_base 6: mod_base = OTHER; note = 2'-deoxy-2'-fluoroadenosine-3'-phosphate
  modified_base 7: mod_base = OTHER; note = 2'-O-methyluridine-3'-phosphate
  modified_base 8: mod_base = OTHER; note = 2'-deoxy-2'-fluorouridine-3'-phosphate
  modified_base 9: mod_base = OTHER; note = 2'-deoxy-2'-fluoroadenosine-3'-phosphate
  modified_base 10: mod_base = OTHER; note = 2'-O-methylguanosine-3'-phosphate
  modified_base 11: mod_base = OTHER; note = 2'-O-methylguanosine-3'-phosphate
  modified_base 12: mod_base = OTHER; note = 2'-O-methylcytidine-3'-phosphate
  modified_base 13: mod_base = OTHER; note = 2'-O-methyladenosine-3'-phosphate
  modified_base 14: mod_base = OTHER; note = 2'-deoxy-2'-fluoroguanosine-3'-phosphate
  modified_base 15: mod_base = OTHER; note = 2'-O-methyladenosine-3'-phosphate
  modified_base 16: mod_base = OTHER; note = 2'-deoxy-2'-fluorocytidine-3'-phosphate
  modified_base 17: mod_base = OTHER; note = 2'-O-methyladenosine-3'-phosphate
  modified_base 18: mod_base = OTHER; note = 2'-O-methyluridine-3'-phosphate
  modified_base 19: mod_base = OTHER; note = 2'-O-methyladenosine-3'-phosphate
  modified_base 20: mod_base = OTHER; note = 2'-O-methylcytidine-3'-phosphate
  modified_base 21: mod_base = OTHER; note = 2'-O-methyladenosine-3'-phosphorothioate
  modified_base 22: mod_base = OTHER; note = 2'-O-methylguanosine-3'-phosphorothioate
  modified_base 23: mod_base = OTHER; note = 2'-O-methyladenosine
ttttaattaggcagacatacaga

SEQ ID NO: 344 - RNA, 23 nt, synthetic construct
  source 1..23: mol_type = other RNA
  modified_base 1: mod_base = OTHER; note = 2'-O-methyluridine-3'-phosphorothioate 5'-(E)-Vinylphosphonate
  modified_base 2: mod_base = OTHER; note = 2'-deoxy-2'-fluorouridine-3'-phosphorothioate
  modified_base 3: mod_base = OTHER; note = 2'-O-methyluridine-3'-phosphate
  modified_base 4: mod_base = OTHER; note = 2'-O-methyluridine-3'-phosphate
  modified_base 5: mod_base = OTHER; note = 2'-O-methyluridine-3'-phosphate
  modified_base 6: mod_base = OTHER; note = 2'-deoxy-2'-fluoroadenosine-3'-phosphate
  modified_base 7: mod_base = OTHER; note = 2'-O-methyladenosine-3'-phosphate
  modified_base 8: mod_base = OTHER; note = 2'-deoxy-2'-fluorouridine-3'-phosphate
  modified_base 9: mod_base = OTHER; note = 2'-deoxy-2'-fluorouridine-3'-phosphate
  modified_base 10: mod_base = OTHER; note = 2'-O-methyladenosine-3'-phosphate
  modified_base 11: mod_base = OTHER; note = 2'-O-methylguanosine-3'-phosphate
  modified_base 12: mod_base = OTHER; note = 2'-O-methylguanosine-3'-phosphate
  modified_base 13: mod_base = OTHER; note = 2'-O-methylcytidine-3'-phosphate
  modified_base 14: mod_base = OTHER; note = 2'-deoxy-2'-fluoroadenosine-3'-phosphate
  modified_base 15: mod_base = OTHER; note = 2'-O-methylguanosine-3'-phosphate
  modified_base 16: mod_base = OTHER; note = 2'-deoxy-2'-fluoroadenosine-3'-phosphate
  modified_base 17: mod_base = OTHER; note = 2'-O-methylcytidine-3'-phosphate
  modified_base 18: mod_base = OTHER; note = 2'-O-methyladenosine-3'-phosphate
  modified_base 19: mod_base = OTHER; note = 2'-O-methyluridine-3'-phosphate
  modified_base 20: mod_base = OTHER; note = 2'-O-methyladenosine-3'-phosphate
  modified_base 21: mod_base = OTHER; note = 2'-O-methylcytidine-3'-phosphorothioate
  modified_base 22: mod_base = OTHER; note = 2'-O-methyladenosine-3'-phosphorothioate
  modified_base 23: mod_base = OTHER; note = 2'-O-methylguanosine
tttttaattaggcagacatacag

SEQ ID NO: 345 - RNA, 23 nt, synthetic construct
  source 1..23: mol_type = other RNA
  modified_base 1: mod_base = OTHER; note = 2'-O-methyluridine-3'-phosphorothioate 5'-(E)-Vinylphosphonate
  modified_base 2: mod_base = OTHER; note = 2'-deoxy-2'-fluorouridine-3'-phosphorothioate
  modified_base 3: mod_base = OTHER; note = 2'-O-methyluridine-3'-phosphate
  modified_base 4: mod_base = OTHER; note = 2'-O-methyluridine-3'-phosphate
  modified_base 5: mod_base = OTHER; note = 2'-O-methyluridine-3'-phosphate
  modified_base 6: mod_base = OTHER; note = 2'-deoxy-2'-fluorouridine-3'-phosphate
  modified_base 7: mod_base = OTHER; note = 2'-O-methyladenosine-3'-phosphate
  modified_base 8: mod_base = OTHER; note = 2'-deoxy-2'-fluoroadenosine-3'-phosphate
  modified_base 9: mod_base = OTHER; note = 2'-deoxy-2'-fluorouridine-3'-phosphate
  modified_base 10: mod_base = OTHER; note = 2'-O-methyluridine-3'-phosphate
  modified_base 11: mod_base = OTHER; note = 2'-O-methyladenosine-3'-phosphate
  modified_base 12: mod_base = OTHER; note = 2'-O-methylguanosine-3'-phosphate
  modified_base 13: mod_base = OTHER; note = 2'-O-methylguanosine-3'-phosphate
  modified_base 14: mod_base = OTHER; note = 2'-deoxy-2'-fluorocytidine-3'-phosphate
  modified_base 15: mod_base = OTHER; note = 2'-O-methyladenosine-3'-phosphate
  modified_base 16: mod_base = OTHER; note = 2'-deoxy-2'-fluoroguanosine-3'-phosphate
  modified_base 17: mod_base = OTHER; note = 2'-O-methyladenosine-3'-phosphate
  modified_base 18: mod_base = OTHER; note = 2'-O-methylcytidine-3'-phosphate
  modified_base 19: mod_base = OTHER; note = 2'-O-methyladenosine-3'-phosphate
  modified_base 20: mod_base = OTHER; note = 2'-O-methyluridine-3'-phosphate
  modified_base 21: mod_base = OTHER; note = 2'-O-methyladenosine-3'-phosphorothioate
  modified_base 22: mod_base = OTHER; note = 2'-O-methylcytidine-3'-phosphorothioate
  modified_base 23: mod_base = OTHER; note = 2'-O-methyladenosine
ttttttaattaggcagacataca

SEQ ID NO: 346 - RNA, 23 nt, synthetic construct
  source 1..23: mol_type = other RNA
  modified_base 1: mod_base = OTHER; note = 2'-O-methyluridine-3'-phosphorothioate 5'-(E)-Vinylphosphonate
  modified_base 2: mod_base = OTHER; note = 2'-deoxy-2'-fluorouridine-3'-phosphorothioate
  modified_base 3: mod_base = OTHER; note = 2'-O-methyluridine-3'-phosphate
  modified_base 4: mod_base = OTHER; note = 2'-O-methyluridine-3'-phosphate
  modified_base 5: mod_base = OTHER; note = 2'-O-methyluridine-3'-phosphate
  modified_base 6: mod_base = OTHER; note = 2'-deoxy-2'-fluorouridine-3'-phosphate
  modified_base 7: mod_base = OTHER; note = 2'-O-methyluridine-3'-phosphate
  modified_base 8: mod_base = OTHER; note = 2'-deoxy-2'-fluorouridine-3'-phosphate
  modified_base 9: mod_base = OTHER; note = 2'-deoxy-2'-fluoroadenosine-3'-phosphate
  modified_base 10: mod_base = OTHER; note = 2'-O-methyladenosine-3'-phosphate
  modified_base 11: mod_base = OTHER; note = 2'-O-methyluridine-3'-phosphate
  modified_base 12: mod_base = OTHER; note = 2'-O-methyluridine-3'-phosphate
  modified_base 13: mod_base = OTHER; note = 2'-O-methyladenosine-3'-phosphate
  modified_base 14: mod_base = OTHER; note = 2'-deoxy-2'-fluoroguanosine-3'-phosphate
  modified_base 15: mod_base = OTHER; note = 2'-O-methylguanosine-3'-phosphate
  modified_base 16: mod_base = OTHER; note = 2'-deoxy-2'-fluorocytidine-3'-phosphate
  modified_base 17: mod_base = OTHER; note = 2'-O-methyladenosine-3'-phosphate
  modified_base 18: mod_base = OTHER; note = 2'-O-methylguanosine-3'-phosphate
  modified_base 19: mod_base = OTHER; note = 2'-O-methyladenosine-3'-phosphate
  modified_base 20: mod_base = OTHER; note = 2'-O-methylcytidine-3'-phosphate
  modified_base 21: mod_base = OTHER; note = 2'-O-methyladenosine-3'-phosphorothioate
  modified_base 22: mod_base = OTHER; note = 2'-O-methyluridine-3'-phosphorothioate
  modified_base 23: mod_base = OTHER; note = 2'-O-methyladenosine
ttttttttaattaggcagacata

SEQ ID NO: 347 - RNA, 23 nt, synthetic construct
  source 1..23: mol_type = other RNA
  modified_base 1: mod_base = OTHER; note = 2'-O-methyluridine-3'-phosphorothioate 5'-(E)-Vinylphosphonate
  modified_base 2: mod_base = OTHER; note = 2'-deoxy-2'-fluorouridine-3'-phosphorothioate
  modified_base 3: mod_base = OTHER; note = 2'-O-methyluridine-3'-phosphate
  modified_base 4: mod_base = OTHER; note = 2'-O-methylguanosine-3'-phosphate
  modified_base 5: mod_base = OTHER; note = 2'-O-methylcytidine-3'-phosphate
  modified_base 6: mod_base = OTHER; note = 2'-deoxy-2'-fluoroadenosine-3'-phosphate
  modified_base 7: mod_base = OTHER; note = 2'-O-methylguanosine-3'-phosphate
  modified_base 8: mod_base = OTHER; note = 2'-deoxy-2'-fluoroguanosine-3'-phosphate
  modified_base 9: mod_base = OTHER; note = 2'-deoxy-2'-fluorouridine-3'-phosphate
  modified_base 10: mod_base = OTHER; note = 2'-O-methyladenosine-3'-phosphate
  modified_base 11: mod_base = OTHER; note = 2'-O-methylguanosine-3'-phosphate
  modified_base 12: mod_base = OTHER; note = 2'-O-methylcytidine-3'-phosphate
  modified_base 13: mod_base = OTHER; note = 2'-O-methyladenosine-3'-phosphate
  modified_base 14: mod_base = OTHER; note = 2'-deoxy-2'-fluorouridine-3'-phosphate
  modified_base 15: mod_base = OTHER; note = 2'-O-methyladenosine-3'-phosphate
  modified_base 16: mod_base = OTHER; note = 2'-deoxy-2'-fluoroadenosine-3'-phosphate
  modified_base 17: mod_base = OTHER; note = 2'-O-methyluridine-3'-phosphate
  modified_base 18: mod_base = OTHER; note = 2'-O-methyladenosine-3'-phosphate
  modified_base 19: mod_base = OTHER; note = 2'-O-methylcytidine-3'-phosphate
  modified_base 20: mod_base = OTHER; note = 2'-O-methyladenosine-3'-phosphate
  modified_base 21: mod_base = OTHER; note = 2'-O-methyladenosine-3'-phosphorothioate
  modified_base 22: mod_base = OTHER; note = 2'-O-methyluridine-3'-phosphorothioate
  modified_base 23: mod_base = OTHER; note = 2'-O-methyladenosine
tttgcaggtagcataatacaata

SEQ ID NO: 348 - RNA, 23 nt, synthetic construct
  source 1..23: mol_type = other RNA
  modified_base 1: mod_base = OTHER; note = 2'-O-methyluridine-3'-phosphorothioate 5'-(E)-Vinylphosphonate
  modified_base 2: mod_base = OTHER; note = 2'-deoxy-2'-fluorouridine-3'-phosphorothioate
  modified_base 3: mod_base = OTHER; note = 2'-O-methyluridine-3'-phosphate
  modified_base 4: mod_base = OTHER; note = 2'-O-methyluridine-3'-phosphate
  modified_base 5: mod_base = OTHER; note = 2'-O-methyluridine-3'-phosphate
  modified_base 6: mod_base = OTHER; note = 2'-deoxy-2'-fluorouridine-3'-phosphate
  modified_base 7: mod_base = OTHER; note = 2'-O-methyluridine-3'-phosphate
  modified_base 8: mod_base = OTHER; note = 2'-deoxy-2'-fluorouridine-3'-phosphate
  modified_base 9: mod_base = OTHER; note = 2'-deoxy-2'-fluoroguanosine-3'-phosphate
  modified_base 10: mod_base = OTHER; note = 2'-O-methylcytidine-3'-phosphate
  modified_base 11: mod_base = OTHER; note = 2'-O-methyladenosine-3'-phosphate
  modified_base 12: mod_base = OTHER; note = 2'-O-methylguanosine-3'-phosphate
  modified_base 13: mod_base = OTHER; note = 2'-O-methylguanosine-3'-phosphate
  modified_base 14: mod_base = OTHER; note = 2'-deoxy-2'-fluorouridine-3'-phosphate
  modified_base 15: mod_base = OTHER; note = 2'-O-methyladenosine-3'-phosphate
  modified_base 16: mod_base = OTHER; note = 2'-deoxy-2'-fluoroguanosine-3'-phosphate
  modified_base 17: mod_base = OTHER; note = 2'-O-methylcytidine-3'-phosphate
  modified_base 18: mod_base = OTHER; note = 2'-O-methyladenosine-3'-phosphate
  modified_base 19: mod_base = OTHER; note = 2'-O-methyluridine-3'-phosphate
  modified_base 20: mod_base = OTHER; note = 2'-O-methyladenosine-3'-phosphate
  modified_base 21: mod_base = OTHER; note = 2'-O-methyladenosine-3'-phosphorothioate
  modified_base 22: mod_base = OTHER; note = 2'-O-methyluridine-3'-phosphorothioate
  modified_base 23: mod_base = OTHER; note = 2'-O-methyladenosine
ttttttttgcaggtagcataata

SEQ ID NO: 349 - RNA, 23 nt, synthetic construct
  source 1..23: mol_type = other RNA
tcactgcttctgctataacagcc

SEQ ID NO: 350 - RNA, 23 nt, synthetic construct
  source 1..23: mol_type = other RNA
aatatgaacaagccgctgctttg

SEQ ID NO: 351 - RNA, 23 nt, synthetic construct
  source 1..23: mol_type = other RNA
ctcagtgggaaggtgtttgtatt

SEQ ID NO: 352 - RNA, 23 nt, synthetic construct
  source 1..23: mol_type = other RNA
aggtgtttgtatttcctagagaa

SEQ ID NO: 353 - RNA, 23 nt, synthetic construct
  source 1..23: mol_type = other RNA
aatctgttactgatcatgtaaac

SEQ ID NO: 354 - RNA, 23 nt, synthetic construct
  source 1..23: mol_type = other RNA
aatctgttactgatcatgtaaac

SEQ ID NO: 355 - RNA, 23 nt, synthetic construct
  source 1..23: mol_type = other RNA
ctgttactgatcatgtaaacttg

SEQ ID NO: 356 - RNA, 23 nt, synthetic construct
  source 1..23: mol_type = other RNA
gttactgatcatgtaaacttgat

SEQ ID NO: 357 - RNA, 23 nt, synthetic construct
  source 1..23: mol_type = other RNA
tgatcatgtaaacttgatcacac

SEQ ID NO: 358 - RNA, 23 nt, synthetic construct
  source 1..23: mol_type = other RNA
gatcatgtaaacttgatcacacc

SEQ ID NO: 359 - RNA, 23 nt, synthetic construct
  source 1..23: mol_type = other RNA
gcctctacagaactttaccttgt

SEQ ID NO: 360 - RNA, 23 nt, synthetic construct
  source 1..23: mol_type = other RNA
gaactttaccttgtgttttcgag

SEQ ID NO: 361 - RNA, 23 nt, synthetic construct
  source 1..23: mol_type = other RNA
gtgttttcgagcctatagtgatc

SEQ ID NO: 362 - RNA, 23 nt, synthetic construct
  source 1..23: mol_type = other RNA
ctgaaactgatcatgtgaagctg

SEQ ID NO: 363 - RNA, 23 nt, synthetic construct
  source 1..23: mol_type = other RNA
aaacctctgcagaattttacact

SEQ ID NO: 364 - RNA, 23 nt, synthetic construct
  source 1..23: mol_type = other RNA
ctgcagaattttacactgtgttt

SEQ ID NO: 365 - RNA, 23 nt, synthetic construct
  source 1..23: mol_type = other RNA
tgcagaattttacactgtgtttc

SEQ ID NO: 366 - RNA, 23 nt, synthetic construct
  source 1..23: mol_type = other RNA
gataatgagctactagtttataa

SEQ ID NO: 367 - RNA, 23 nt, synthetic construct
  source 1..23: mol_type = other RNA
ataatgagctactagtttataaa

SEQ ID NO: 368 - RNA, 23 nt, synthetic construct
  source 1..23: mol_type = other RNA
taatgagctactagtttataaag

SEQ ID NO: 369 - RNA, 23 nt, synthetic construct
  source 1..23: mol_type = other RNA
aatgagctactagtttataaaga

SEQ ID NO: 370 - RNA, 23 nt, synthetic construct
  source 1..23: mol_type = other RNA
atgagctactagtttataaagaa

SEQ ID NO: 371 - RNA, 23 nt, synthetic construct
  source 1..23: mol_type = other RNA
tgagctactagtttataaagaaa

SEQ ID NO: 372 - RNA, 23 nt, synthetic construct
  source 1..23: mol_type = other RNA
tgtgtttccgaacctacagtgac

SEQ ID NO: 373 - RNA, 23 nt, synthetic construct
  source 1..23: mol_type = other RNA
agctactagtttataaagaaaga

SEQ ID NO: 374 - RNA, 23 nt, synthetic construct
  source 1..23: mol_type = other RNA
ttccgaacctacagtgacctttc

SEQ ID NO: 375 - RNA, 23 nt, synthetic construct
  source 1..23: mol_type = other RNA
tagtttataaagaaagagttgga

SEQ ID NO: 376 - RNA, 23 nt, synthetic construct
  source 1..23: mol_type = other RNA
tataaagaaagagttggagagta

SEQ ID NO: 377 - RNA, 23 nt, synthetic construct
  source 1..23: mol_type = other RNA
gagttggagagtatagtctatac

SEQ ID NO: 378 - RNA, 23 nt, synthetic construct
  source 1..23: mol_type = other RNA
agagtatagtctatacattggaa

SEQ ID NO: 379 - RNA, 23 nt, synthetic construct
  source 1..23: mol_type = other RNA
tatagtctatacattggaagaca

SEQ ID NO: 380 - RNA, 23 nt, synthetic construct
  source 1..23: mol_type = other RNA
tcagagtcttttctcctacagtg

SEQ ID NO: 381 - RNA, 23 nt, synthetic construct
  source 1..23: mol_type = other RNA
tatacattggaagacacaaagtt

SEQ ID NO: 382 - RNA, 23 nt, synthetic construct
  source 1..23: mol_type = other RNA
cattggaagacacaaagttacat

SEQ ID NO: 383 - RNA, 23 nt, synthetic construct
  source 1..23: mol_type = other RNA
gaagacacaaagttacatccaaa

SEQ ID NO: 384 - RNA, 23 nt, synthetic construct
  source 1..23: mol_type = other RNA
acacaaagttacatccaaagtta

SEQ ID NO: 385 - RNA, 23 nt, synthetic construct
  source 1..23: mol_type = other RNA
caaagttacatccaaagttatcg

SEQ ID NO: 386 - RNA, 23 nt, synthetic construct
  source 1..23: mol_type = other RNA
gttacatccaaagttatcgaaaa

SEQ ID NO: 387 - RNA, 23 nt, synthetic construct
  source 1..23: mol_type = other RNA
catccaaagttatcgaaaagttc

SEQ ID NO: 388 - RNA, 23 nt, synthetic construct
  source 1..23: mol_type = other RNA
cagagacaatgagctactaattt

SEQ ID NO: 389 - RNA, 23 nt, synthetic construct
  source 1..23: mol_type = other RNA
agagacaatgagctactaattta

SEQ ID NO: 390 - RNA, 23 nt, synthetic construct
  source 1..23: mol_type = other RNA
acaatgagctactaatttataaa

SEQ ID NO: 391 - RNA, 23 nt, synthetic construct
  source 1..23: mol_type = other RNA
atgagctactaatttataaagaa

SEQ ID NO: 392 - RNA, 23 nt, synthetic construct
  source 1..23: mol_type = other RNA
tcctcatcaggtattgctgaatt

SEQ ID NO: 393 - RNA, 23 nt, synthetic construct
  source 1..23: mol_type = other RNA
catcaggtattgctgaattttgg

SEQ ID NO: 394 - RNA, 23 nt, synthetic construct
  source 1..23: mol_type = other RNA
aggtattgctgaattttggatca

SEQ ID NO: 395 - RNA, 23 nt, synthetic construct
  source 1..23: mol_type = other RNA
tagaagctcagcccaagattgtc

SEQ ID NO: 396 - RNA, 23 nt, synthetic construct
  source 1..23: mol_type = other RNA
tggcattgttgaattttgggtca

SEQ ID NO: 397 - RNA, 23 nt, synthetic construct
  source 1..23: mol_type = other RNA
cattgttgaattttgggtcaatg

SEQ ID NO: 398 - RNA, 23 nt, synthetic construct
  source 1..23: mol_type = other RNA
ggattcctatgggggcaagtttg

SEQ ID NO: 399 - RNA, 23 nt, synthetic construct
  source 1..23: mol_type = other RNA
agaaaatatcctgtctgcctatc

SEQ ID NO: 400 - RNA, 23 nt, synthetic construct
  source 1..23: mol_type = other RNA
gaaaatatcctgtctgcctatca

SEQ ID NO: 401 - RNA, 23 nt, synthetic construct
  source 1..23: mol_type = other RNA
aaaatatcctgtctgcctatcag

SEQ ID NO: 402 - RNA, 23 nt, synthetic construct
  source 1..23: mol_type = other RNA
ggcaggctctgaactatgaaatc

SEQ ID NO: 403 - RNA, 23 nt, synthetic construct
  source 1..23: mol_type = other RNA
gcaggctctgaactatgaaatca

SEQ ID NO: 404 - RNA, 23 nt, synthetic construct
  source 1..23: mol_type = other RNA
caggctctgaactatgaaatcag

SEQ ID NO: 405 - RNA, 23 nt, synthetic construct
  source 1..23: mol_type = other RNA
aggctctgaactatgaaatcaga

SEQ ID NO: 406 - RNA, 23 nt, synthetic construct
  source 1..23: mol_type = other RNA
cagaggatatgtcatcatcaaac

SEQ ID NO: 407 - RNA, 23 nt, synthetic construct
  source 1..23: mol_type = other RNA
gatatgtcatcatcaaacccttg

SEQ ID NO: 408 - RNA, 23 nt, synthetic construct
  source 1..23: mol_type = other RNA
gtcatcatcaaacccttggtgtg

SEQ ID NO: 409 - RNA, 23 nt, synthetic construct
  source 1..23: mol_type = other RNA
tcaacgagagcacttgaaaatga

SEQ ID NO: 410 - RNA, 23 nt, synthetic construct
  source 1..23: mol_type = other RNA
aacgagagcacttgaaaatgaaa

SEQ ID NO: 411 - RNA, 23 nt, synthetic construct
  source 1..23: mol_type = other RNA
agagcacttgaaaatgaaatgac

SEQ ID NO: 412 - RNA, 23 nt, synthetic construct
  source 1..23: mol_type = other RNA
gagcacttgaaaatgaaatgact

SEQ ID NO: 413 - RNA, 23 nt, synthetic construct
  source 1..23: mol_type = other RNA
gaaaatgaaatgactgtctaaga

SEQ ID NO: 414 - RNA, 23 nt, synthetic construct
  source 1..23: mol_type = other RNA
aaaatgaaatgactgtctaagag

SEQ ID NO: 415 - RNA, 23 nt, synthetic construct
  source 1..23: mol_type = other RNA
aatgaaatgactgtctaagagat

SEQ ID NO: 416 - RNA, 23 nt, synthetic construct
  source 1..23: mol_type = other RNA
atgaaatgactgtctaagagatc

SEQ ID NO: 417 - RNA, 23 nt, synthetic construct
  source 1..23: mol_type = other RNA
tgaaatgactgtctaagagatct

SEQ ID NO: 418 - RNA, 23 nt, synthetic construct
  source 1..23: mol_type = other RNA
agcaactggatactagatcttac

SEQ ID NO: 419 - RNA, 23 nt, synthetic construct
  source 1..23: mol_type = other RNA
ctgcagctctttcttctttgaat

SEQ ID NO: 420 - RNA, 23 nt, synthetic construct
  source 1..23: mol_type = other RNA
agctctttcttctttgaatttcc

SEQ ID NO: 421 - RNA, 23 nt, synthetic construct
  source 1..23: mol_type = other RNA
ctctttcttctttgaatttccta

SEQ ID NO: 422 - RNA, 23 nt, synthetic construct
  source 1..23: mol_type = other RNA
ttctttgaatttcctatctgtat

SEQ ID NO: 423 - RNA, 23 nt, synthetic construct
  source 1..23: mol_type = other RNA
tctttgaatttcctatctgtatg

SEQ ID NO: 424 - RNA, 23 nt, synthetic construct
  source 1..23: mol_type = other RNA
tttgaatttcctatctgtatgtc

SEQ ID NO: 425 - RNA, 23 nt, synthetic construct
  source 1..23: mol_type = other RNA
tgaatttcctatctgtatgtctg

SEQ ID NO: 426 - RNA, 23 nt, synthetic construct
  source 1..23: mol_type = other RNA
ctatctgtatgtctgcctaatta

SEQ ID NO: 427 - RNA, 23 nt, synthetic construct
  source 1..23: mol_type = other RNA
tctgtatgtctgcctaattaaaa

SEQ ID NO: 428 - RNA, 23 nt, synthetic construct
  source 1..23: mol_type = other RNA
ctgtatgtctgcctaattaaaaa

SEQ ID NO: 429 - RNA, 23 nt, synthetic construct
  source 1..23: mol_type = other RNA
tgtatgtctgcctaattaaaaaa

SEQ ID NO: 430 - RNA, 23 nt, synthetic construct
  source 1..23: mol_type = other RNA
tatgtctgcctaattaaaaaaat

SEQ ID NO: 431 - RNA, 23 nt, synthetic construct
  source 1..23: mol_type = other RNA
tattgtattatgctacctgcaaa

SEQ ID NO: 432 - RNA, 23 nt, synthetic construct
  source 1..23: mol_type = other RNA
tattatgctacctgcaaaaaaaa

SEQ ID NO: 433 - RNA, 19 nt, synthetic construct
  source 1..19: mol_type = other RNA
aatatcagacgctagggga

SEQ ID NO: 434 - RNA, 19 nt, synthetic construct
  source 1..19: mol_type = other RNA
gggggacagccactgtgtt

SEQ ID NO: 435 - RNA, 19 nt, synthetic construct
  source 1..19: mol_type = other RNA
ttgtctgctaccctcatca

SEQ ID NO: 436 - RNA, 19 nt, synthetic construct
  source 1..19: mol_type = other RNA
catcctggtcactgcttct

SEQ ID NO: 437 - RNA, 19 nt, synthetic construct
  source 1..19: mol_type = other RNA
ttctgctataacagcccta

SEQ ID NO: 438 - RNA, 19 nt, synthetic construct
  source 1..19: mol_type = other RNA
ccctaggccaggaatatga

SEQ ID NO: 439 - RNA, 19 nt, synthetic construct
  source 1..19: mol_type = other RNA
caggaatatgaacaagcca

SEQ ID NO: 440 - RNA, 19 nt, synthetic construct
  source 1..19: mol_type = other RNA
agccgctgctttggatcta

SEQ ID NO: 441 - RNA, 19 nt, synthetic construct
  source 1..19: mol_type = other RNA
atctctgtcctcaccagca

SEQ ID NO: 442 - RNA, 19 nt, synthetic construct
  source 1..19: mol_type = other RNA
cagcctcctggaagccttt

SEQ ID NO: 443 - RNA, 19 nt, synthetic construct
  source 1..19: mol_type = other RNA
tttgctcacacagacctca

SEQ ID NO: 444 - RNA, 19 nt, synthetic construct
  source 1..19: mol_type = other RNA
cctcagtgggaaggtgttt

SEQ ID NO: 445 - RNA, 19 nt, synthetic construct
  source 1..19: mol_type = other RNA
ggaaggtgtttgtatttca

SEQ ID NO: 446 - RNA, 19 nt, synthetic construct
  source 1..19: mol_type = other RNA
ttcctagagaatctgttaa

SEQ ID NO: 447 - RNA, 19 nt, synthetic construct
  source 1..19: mol_type = other RNA
ttactgatcatgtaaactt

SEQ ID NO: 448 - RNA, 19 nt, synthetic construct
  source 1..19: mol_type = other RNA
aacttgatcacaccgctga

SEQ ID NO: 449 - RNA, 19 nt, synthetic construct
  source 1..19: mol_type = other RNA
gctggagaagcctctacaa

SEQ ID NO: 450 - RNA, 19 nt, synthetic construct
  source 1..19: mol_type = other RNA
tacagaactttaccttgta

SEQ ID NO: 451 - RNA, 19 nt, synthetic construct
  source 1..19: mol_type = other RNA
actttaccttgtgttttca

SEQ ID NO: 452 - RNA, 19 nt, synthetic construct
  source 1..19: mol_type = other RNA
ttcgagcctatagtgatct

SEQ ID NO: 453 - RNA, 19 nt, synthetic construct
  source 1..19: mol_type = other RNA
gatctctctcgtgcctaca

SEQ ID NO: 454 - RNA, 19 nt, synthetic construct
  source 1..19: mol_type = other RNA
tctcgtgcctacagcctct

SEQ ID NO: 455 - RNA, 19 nt, synthetic construct
  source 1..19: mol_type = other RNA
cagcctcttctcctacaat

SEQ ID NO: 456 - RNA, 19 nt, synthetic construct
  source 1..19: mol_type = other RNA
caatacccaaggcagggat

SEQ ID NO: 457 - RNA, 19 nt, synthetic construct
  source 1..19: mol_type = other RNA
gggataatgagctactagt

SEQ ID NO: 458 - RNA, 19 nt, synthetic construct
  source 1..19: mol_type = other RNA
tagtttataaagaaagagt

SEQ ID NO: 459 - RNA, 19 nt, synthetic construct
  source 1..19: mol_type = other RNA
agagttggagagtatagta

SEQ ID NO: 460 - RNA, 19 nt, synthetic construct
  source 1..19: mol_type = other RNA
tagtctatacattggaaga

SEQ ID NO: 461 - RNA, 19 nt, synthetic construct
  source 1..19: mol_type = other RNA
ttggaagacacaaagttaa

SEQ ID NO: 462 - RNA, 19 nt, synthetic construct
  source 1..19: mol_type = other RNA
cacaaagttacatccaaag

SEQ ID NO: 463 - RNA, 19 nt, synthetic construct
  source 1..19: mol_type = other RNA
aaagttatcgaaaagttca

SEQ ID NO: 464 - RNA, 19 nt, synthetic construct
  source 1..19: mol_type = other RNA
gttcccggctccagtgcaa

SEQ ID NO: 465 - RNA, 19 nt, synthetic construct
  source 1..19: mol_type = other RNA
tgcacatctgtgtgagcta

SEQ ID NO: 466 - RNA, 19 nt, synthetic construct
  source 1..19: mol_type = other RNA
agctgggagtcctcatcaa

SEQ ID NO: 467 - RNA, 19 nt, synthetic construct
  source 1..19: mol_type = other RNA
gtattgctgaattttggat

SEQ ID NO: 468 - RNA, 19 nt, synthetic construct
  source 1..19: mol_type = other RNA
ggatcaatgggacaccttt

SEQ ID NO: 469 - RNA, 19 nt, synthetic construct
  source 1..19: mol_type = other RNA
ctttggtgaaaaagggtct

SEQ ID NO: 470 - RNA, 19 nt, synthetic construct
  source 1..19: mol_type = other RNA
ggtctgcgacagggttact

SEQ ID NO: 471 - RNA, 19 nt, synthetic construct
  source 1..19: mol_type = other RNA
tttgtagaagctcagccca

SEQ ID NO: 472 - RNA, 19 nt, synthetic construct
  source 1..19: mol_type = other RNA
gcccaagattgtcctggga

SEQ ID NO: 473 - RNA, 19 nt, synthetic construct
  source 1..19: mol_type = other RNA
tggggcaggaacaggatta

SEQ ID NO: 474 - RNA, 19 nt, synthetic construct
  source 1..19: mol_type = other RNA
tcctatgggggcaagttta

SEQ ID NO: 475 - RNA, 19 nt, synthetic construct
  source 1..19: mol_type = other RNA
tttgataggagccagtcct

SEQ ID NO: 476 - RNA, 19 nt, synthetic construct
  source 1..19: mol_type = other RNA
gtcctttgtgggagagatt

SEQ ID NO: 477 - RNA, 19 nt, synthetic construct
  source 1..19: mol_type = other RNA
agattggggatttgtacat

SEQ ID NO: 478 - RNA, 19 nt, synthetic construct
  source 1..19: mol_type = other RNA
tttgtacatgtgggactct

SEQ ID NO: 479 - RNA, 19 nt, synthetic construct
  source 1..19: mol_type = other RNA
atgtgggactctgtgctga

SEQ ID NO: 480 - RNA, 19 nt, synthetic construct
  source 1..19: mol_type = other RNA
ctgcccccagaaaatatca

SEQ ID NO: 481 - RNA, 19 nt, synthetic construct
  source 1..19: mol_type = other RNA
tatcctgtctgcctatcaa

SEQ ID NO: 482 - RNA, 19 nt, synthetic construct
  source 1..19: mol_type = other RNA
cctatcagggtacccctct

SEQ ID NO: 483 - RNA, 19 nt, synthetic construct
  source 1..19: mol_type = other RNA
ctctccctgccaatatcct

SEQ ID NO: 484 - RNA, 19 nt, synthetic construct
  source 1..19: mol_type = other RNA
tcctggactggcaggctct

SEQ ID NO: 485 - RNA, 19 nt, synthetic construct
  source 1..19: mol_type = other RNA
tggcaggctctgaactata

SEQ ID NO: 486 - RNA, 19 nt, synthetic construct
  source 1..19: mol_type = other RNA
tatgaaatcagaggatata

SEQ ID NO: 487 - RNA, 19 nt, synthetic construct
  source 1..19: mol_type = other RNA
tatgtcatcatcaaaccct

SEQ ID NO: 488 - RNA, 19 nt, synthetic construct
  source 1..19: mol_type = other RNA
acccttggtgtgggtctga

SEQ ID NO: 489 - RNA, 19 nt, synthetic construct
  source 1..19: mol_type = other RNA
tgtgggtctgaggtcttga

SEQ ID NO: 490 - RNA, 19 nt, synthetic construct
  source 1..19: mol_type = other RNA
ttgactcaacgagagcact

SEQ ID NO: 491 - RNA, 19 nt, synthetic construct
  source 1..19: mol_type = other RNA
gcacttgaaaatgaaatga

SEQ ID NO: 492 - RNA, 19 nt, synthetic construct
  source 1..19: mol_type = other RNA
aatgactgtctaagagata

SEQ ID NO: 493 - RNA, 19 nt, synthetic construct
  source 1..19: mol_type = other RNA
agatctggtcaaagcaact

SEQ ID NO: 494 - RNA, 19 nt, synthetic construct
  source 1..19: mol_type = other RNA
caaagcaactggatactaa

SEQ ID NO: 495 - RNA, 19 nt, synthetic construct
  source 1..19: mol_type = other RNA
ctagatcttacatctgcaa

SEQ ID NO: 496 - RNA, 19 nt, synthetic construct
  source 1..19: mol_type = other RNA
gcagctctttcttctttga

SEQ ID NO: 497 - RNA, 19 nt, synthetic construct
  source 1..19: mol_type = other RNA
ttgaatttcctatctgtat

SEQ ID NO: 498 - RNA, 19 nt, synthetic construct
  source 1..19: mol_type = other RNA
ctatctgtatgtctgccta

SEQ ID NO: 499 - RNA, 19 nt, synthetic construct
  source 1..19: mol_type = other RNA
cctaattaaaaaaatatat

SEQ ID NO: 500 - RNA, 19 nt, synthetic construct
  source 1..19: mol_type = other RNA
tatatattgtattatgcta

SEQ ID NO: 501 - RNA, 19 nt, synthetic construct
  source 1..19: mol_type = other RNA
tcccctagcgtctgatatt

SEQ ID NO: 502 - RNA, 19 nt, synthetic construct
  source 1..19: mol_type = other RNA
aacacagtggctgtccccc

SEQ ID NO: 503 - RNA, 19 nt, synthetic construct
  source 1..19: mol_type = other RNA
tgatgagggtagcagacaa

SEQ ID NO: 504 - RNA, 19 nt, synthetic construct
  source 1..19: mol_type = other RNA
agaagcagtgaccaggatg

SEQ ID NO: 505 - RNA, 19 nt, synthetic construct
  source 1..19: mol_type = other RNA
tagggctgttatagcagaa

SEQ ID NO: 506 - RNA, 19 nt, synthetic construct
  source 1..19: mol_type = other RNA
tcatattcctggcctaggg

SEQ ID NO: 507 - RNA, 19 nt, synthetic construct
  source 1..19: mol_type = other RNA
tggcttgttcatattcctg

SEQ ID NO: 508 - RNA, 19 nt, synthetic construct
  source 1..19: mol_type = other RNA
tagatccaaagcagcggct

SEQ ID NO: 509 - RNA, 19 nt, synthetic construct
  source 1..19: mol_type = other RNA
tgctggtgaggacagagat

SEQ ID NO: 510 - RNA, 19 nt, synthetic construct
  source 1..19: mol_type = other RNA
aaaggcttccaggaggctg

SEQ ID NO: 511 - RNA, 19 nt, synthetic construct
  source 1..19: mol_type = other RNA
tgaggtctgtgtgagcaaa

SEQ ID NO: 512 - RNA, 19 nt, synthetic construct
  source 1..19: mol_type = other RNA
aaacaccttcccactgagg

SEQ ID NO: 513 - RNA, 19 nt, synthetic construct
  source 1..19: mol_type = other RNA
tgaaatacaaacaccttcc

SEQ ID NO: 514 - RNA, 19 nt, synthetic construct
  source 1..19: mol_type = other RNA
ttaacagattctctaggaa

SEQ ID NO: 515 - RNA, 19 nt, synthetic construct
  source 1..19: mol_type = other RNA
aagtttacatgatcagtaa

SEQ ID NO: 516 - RNA, 19 nt, synthetic construct
  source 1..19: mol_type = other RNA
tcagcggtgtgatcaagtt

SEQ ID NO: 517 - RNA, 19 nt, synthetic construct
  source 1..19: mol_type = other RNA
ttgtagaggcttctccagc

SEQ ID NO: 518 - RNA, 19 nt, synthetic construct
  source 1..19: mol_type = other RNA
tacaaggtaaagttctgta

SEQ ID NO: 519 - RNA, 19 nt, synthetic construct
  source 1..19: mol_type = other RNA
tgaaaacacaaggtaaagt

SEQ ID NO: 520 - RNA, 19 nt, synthetic construct
  source 1..19: mol_type = other RNA
agatcactataggctcgaa

SEQ ID NO: 521 - RNA, 19 nt, synthetic construct
  source 1..19: mol_type = other RNA
tgtaggcacgagagagatc

SEQ ID NO: 522 - RNA, 19 nt, synthetic construct
  source 1..19: mol_type = other RNA
agaggctgtaggcacgaga

SEQ ID NO: 523 - RNA, 19 nt, synthetic construct
  source 1..19: mol_type = other RNA
attgtaggagaagaggctg

SEQ ID NO: 524 - RNA, 19 nt, synthetic construct
  source 1..19: mol_type = other RNA
atccctgccttgggtattg

SEQ ID NO: 525 - RNA, 19 nt, synthetic construct
  source 1..19: mol_type = other RNA
actagtagctcattatccc

SEQ ID NO: 526 - RNA, 19 nt, synthetic construct
  source 1..19: mol_type = other RNA
actctttctttataaacta

SEQ ID NO: 527 - RNA, 19 nt, synthetic construct
  source 1..19: mol_type = other RNA
tactatactctccaactct

SEQ ID NO: 528 - RNA, 19 nt, synthetic construct
  source 1..19: mol_type = other RNA
tcttccaatgtatagacta

SEQ ID NO: 529 - RNA, 19 nt, synthetic construct
  source 1..19: mol_type = other RNA
ttaactttgtgtcttccaa

SEQ ID NO: 530 - RNA, 19 nt, synthetic construct
  source 1..19: mol_type = other RNA
ctttggatgtaactttgtg

SEQ ID NO: 531 - RNA, 19 nt, synthetic construct
  source 1..19: mol_type = other RNA
tgaacttttcgataacttt

SEQ ID NO: 532 - RNA, 19 nt, synthetic construct
  source 1..19: mol_type = other RNA
ttgcactggagccgggaac

SEQ ID NO: 533 - RNA, 19 nt, synthetic construct
  source 1..19: mol_type = other RNA
tagctcacacagatgtgca

SEQ ID NO: 534 - RNA, 19 nt, synthetic construct
  source 1..19: mol_type = other RNA
ttgatgaggactcccagct

SEQ ID NO: 535 - RNA, 19 nt, synthetic construct
  source 1..19: mol_type = other RNA
atccaaaattcagcaatac

SEQ ID NO: 536 - RNA, 19 nt, synthetic construct
  source 1..19: mol_type = other RNA
aaaggtgtcccattgatcc

SEQ ID NO: 537 - RNA, 19 nt, synthetic construct
  source 1..19: mol_type = other RNA
agaccctttttcaccaaag

SEQ ID NO: 538 - RNA, 19 nt, synthetic construct
  source 1..19: mol_type = other RNA
agtaaccctgtcgcagacc

SEQ ID NO: 539 - RNA, 19 nt, synthetic construct
  source 1..19: mol_type = other RNA
tgggctgagcttctacaaa

SEQ ID NO: 540 - RNA, 19 nt, synthetic construct
  source 1..19: mol_type = other RNA
tcccaggacaatcttgggc

SEQ ID NO: 541 - RNA, 19 nt, synthetic construct
  source 1..19: mol_type = other RNA
taatcctgttcctgcccca

SEQ ID NO: 542 - RNA, 19 nt, synthetic construct
  source 1..19: mol_type = other RNA
taaacttgcccccatagga

SEQ ID NO: 543 - RNA, 19 nt, synthetic construct
  source 1..19: mol_type = other RNA
aggactggctcctatcaaa

SEQ ID NO: 544 - RNA, 19 nt, synthetic construct
  source 1..19: mol_type = other RNA
aatctctcccacaaaggac

SEQ ID NO: 545 - RNA, 19 nt, synthetic construct
  source 1..19: mol_type = other RNA
atgtacaaatccccaatct

SEQ ID NO: 546 - RNA, 19 nt, synthetic construct
  source 1..19: mol_type = other RNA
agagtcccacatgtacaaa

SEQ ID NO: 547 - RNA, 19 nt, synthetic construct
  source 1..19: mol_type = other RNA
tcagcacagagtcccacat

SEQ ID NO: 548 - RNA, 19 nt, synthetic construct
  source 1..19: mol_type = other RNA
tgatattttctgggggcag

SEQ ID NO: 549 - RNA, 19 nt, synthetic construct
  source 1..19: mol_type = other RNA
ttgataggcagacaggata

SEQ ID NO: 550 - RNA, 19 nt, synthetic construct
  source 1..19: mol_type = other RNA
agaggggtaccctgatagg

SEQ ID NO: 551 - RNA, 19 nt, synthetic construct
  source 1..19: mol_type = other RNA
aggatattggcagggagag

SEQ ID NO: 552 - RNA, 19 nt, synthetic construct
  source 1..19: mol_type = other RNA
agagcctgccagtccagga

SEQ ID NO: 553 - RNA, 19 nt, synthetic construct
  source 1..19: mol_type = other RNA
tatagttcagagcctgcca

SEQ ID NO: 554 - RNA, 19 nt, synthetic construct
  source 1..19: mol_type = other RNA
tatatcctctgatttcata

SEQ ID NO: 555 - RNA, 19 nt, synthetic construct
  source 1..19: mol_type = other RNA
agggtttgatgatgacata

SEQ ID NO: 556 - RNA, 19 nt, synthetic construct
  source 1..19: mol_type = other RNA
tcagacccacaccaagggt

SEQ ID NO: 557 - RNA, 19 nt, synthetic construct
  source 1..19: mol_type = other RNA
tcaagacctcagacccaca

SEQ ID NO: 558 - RNA, 19 nt, synthetic construct
  source 1..19: mol_type = other RNA
agtgctctcgttgagtcaa

SEQ ID NO: 559 - RNA, 19 nt, synthetic construct
  source 1..19: mol_type = other RNA
tcatttcattttcaagtgc

SEQ ID NO: 560 - RNA, 19 nt, synthetic construct
  source 1..19: mol_type = other RNA
tatctcttagacagtcatt

SEQ ID NO: 561 - RNA, 19 nt, synthetic construct
  source 1..19: mol_type = other RNA
agttgctttgaccagatct

SEQ ID NO: 562 - RNA, 19 nt, synthetic construct
  source 1..19: mol_type = other RNA
ttagtatccagttgctttg

SEQ ID NO: 563 - RNA, 19 nt, synthetic construct
  source 1..19: mol_type = other RNA
ttgcagatgtaagatctag

SEQ ID NO: 564 - RNA, 19 nt, synthetic construct
  source 1..19: mol_type = other RNA
tcaaagaagaaagagctgc

SEQ ID NO: 565 - RNA, 19 nt, synthetic construct
  source 1..19: mol_type = other RNA
atacagataggaaattcaa

SEQ ID NO: 566 - RNA, 19 nt, synthetic construct
  source 1..19: mol_type = other RNA
taggcagacatacagatag

SEQ ID NO: 567 - RNA, 19 nt, synthetic construct
  source 1..19: mol_type = other RNA
atatatttttttaattagg

SEQ ID NO: 568 - RNA, 19 nt, synthetic construct
  source 1..19: mol_type = other RNA
tagcataatacaatatata

SEQ ID NO: 569 - DNA, 21 bp, synthetic construct
  source 1..21: mol_type = other DNA
  modified_base 1: mod_base = OTHER; note = adenosine-3'-phosphate
  modified_base 2: mod_base = OTHER; note = adenosine-3'-phosphate
  modified_base 3: mod_base = OTHER; note = uridine-3'-phosphate
  modified_base 4: mod_base = OTHER; note = adenosine-3'-phosphate
  modified_base 5: mod_base = OTHER; note = uridine-3'-phosphate
  modified_base 6: mod_base = OTHER; note = cytidine-3'-phosphate
  modified_base 7: mod_base = OTHER; note = adenosine-3'-phosphate
  modified_base 8: mod_base = OTHER; note = guanosine-3'-phosphate
  modified_base 9: mod_base = OTHER; note = adenosine-3'-phosphate
  modified_base 10: mod_base = OTHER; note = cytidine-3'-phosphate
  modified_base 11: mod_base = OTHER; note = guanosine-3'-phosphate
  modified_base 12: mod_base = OTHER; note = cytidine-3'-phosphate
  modified_base 13: mod_base = OTHER; note = uridine-3'-phosphate
  modified_base 14: mod_base = OTHER; note = adenosine-3'-phosphate
  modified_base 15: mod_base = OTHER; note = guanosine-3'-phosphate
  modified_base 16: mod_base = OTHER; note = guanosine-3'-phosphate
  modified_base 17: mod_base = OTHER; note = guanosine-3'-phosphate
  modified_base 18: mod_base = OTHER; note = guanosine-3'-phosphate
  modified_base 19: mod_base = OTHER; note = adenosine-3'-phosphate
  misc_feature 1..19: note = RNA
  misc_feature 20..21: note = DNA
aatatcagacgctaggggatt

SEQ ID NO: 570 - DNA, 21 bp, synthetic construct
  source 1..21: mol_type = other DNA
  modified_base 1: mod_base = OTHER; note = guanosine-3'-phosphate
  modified_base 2: mod_base = OTHER; note = guanosine-3'-phosphate
  modified_base 3: mod_base = OTHER; note = guanosine-3'-phosphate
  modified_base 4: mod_base = OTHER; note = guanosine-3'-phosphate
  modified_base 5: mod_base = OTHER; note = guanosine-3'-phosphate
  modified_base 6: mod_base = OTHER; note = adenosine-3'-phosphate
  modified_base 7: mod_base = OTHER; note = cytidine-3'-phosphate
  modified_base 8: mod_base = OTHER; note = adenosine-3'-phosphate
  modified_base 9: mod_base = OTHER; note = guanosine-3'-phosphate
  modified_base 10: mod_base = OTHER; note = cytidine-3'-phosphate
  modified_base 11: mod_base = OTHER; note = cytidine-3'-phosphate
  modified_base 12: mod_base = OTHER; note = adenosine-3'-phosphate
  modified_base 13: mod_base = OTHER; note = cytidine-3'-phosphate
  modified_base 14: mod_base = OTHER; note = uridine-3'-phosphate
  modified_base 15: mod_base = OTHER; note = guanosine-3'-phosphate
  modified_base 16: mod_base = OTHER; note = uridine-3'-phosphate
  modified_base 17: mod_base = OTHER; note = guanosine-3'-phosphate
  modified_base 18: mod_base = OTHER; note = uridine-3'-phosphate
  modified_base 19: mod_base = OTHER; note = uridine-3'-phosphate
  misc_feature 1..19: note = RNA
  misc_feature 20..21: note = DNA
gggggacagccactgtgtttt

SEQ ID NO: 571 - DNA, 21 bp, synthetic construct
  source 1..21: mol_type = other DNA
  modified_base 1: mod_base = OTHER; note = uridine-3'-phosphate
  modified_base 2: mod_base = OTHER; note = uridine-3'-phosphate
  modified_base 3: mod_base = OTHER; note = guanosine-3'-phosphate
  modified_base 4: mod_base = OTHER; note = uridine-3'-phosphate
  modified_base 5: mod_base = OTHER; note = cytidine-3'-phosphate
  modified_base 6: mod_base = OTHER; note = uridine-3'-phosphate
  modified_base 7: mod_base = OTHER; note = guanosine-3'-phosphate
  modified_base 8: mod_base = OTHER; note = cytidine-3'-phosphate
  modified_base 9: mod_base = OTHER; note = uridine-3'-phosphate
  modified_base 10: mod_base = OTHER; note = adenosine-3'-phosphate
  modified_base 11: mod_base = OTHER; note = cytidine-3'-phosphate
  modified_base 12: mod_base = OTHER; note = cytidine-3'-phosphate
  modified_base 13: mod_base = OTHER; note = cytidine-3'-phosphate
  modified_base 14: mod_base = OTHER; note = uridine-3'-phosphate
  modified_base 15: mod_base = OTHER; note = cytidine-3'-phosphate
  modified_base 16: mod_base = OTHER; note = adenosine-3'-phosphate
  modified_base 17: mod_base = OTHER; note = uridine-3'-phosphate
  modified_base 18: mod_base = OTHER; note = cytidine-3'-phosphate
  modified_base 19: mod_base = OTHER; note = adenosine-3'-phosphate
  misc_feature 1..19: note = RNA
  misc_feature 20..21: note = DNA
ttgtctgctaccctcatcatt

SEQ ID NO: 572 - DNA, 21 bp, synthetic construct
  source 1..21: mol_type = other DNA
  modified_base 1: mod_base = OTHER; note = cytidine-3'-phosphate
  modified_base 2: mod_base = OTHER; note = adenosine-3'-phosphate
  modified_base 3: mod_base = OTHER; note = uridine-3'-phosphate
  modified_base 4: mod_base = OTHER; note = cytidine-3'-phosphate
  modified_base 5: mod_base = OTHER; note = cytidine-3'-phosphate
  modified_base 6: mod_base = OTHER; note = uridine-3'-phosphate
  modified_base 7: mod_base = OTHER; note = guanosine-3'-phosphate
  modified_base 8: mod_base = OTHER; note = guanosine-3'-phosphate
  modified_base 9: mod_base = OTHER; note = uridine-3'-phosphate
  modified_base 10: mod_base = OTHER; note = cytidine-3'-phosphate
  modified_base 11: mod_base = OTHER; note = adenosine-3'-phosphate
  modified_base 12: mod_base = OTHER; note = cytidine-3'-phosphate
  modified_base 13: mod_base = OTHER; note = uridine-3'-phosphate
  modified_base 14: mod_base = OTHER; note = guanosine-3'-phosphate
  modified_base 15: mod_base = OTHER; note = cytidine-3'-phosphate
  modified_base 16: mod_base = OTHER; note = uridine-3'-phosphate
  modified_base 17: mod_base = OTHER; note = uridine-3'-phosphate
  modified_base 18: mod_base = OTHER; note = cytidine-3'-phosphate
  modified_base 19: mod_base = OTHER; note = uridine-3'-phosphate
  misc_feature 1..19: note = RNA
  misc_feature 20..21: note = DNA
catcctggtcactgcttcttt

SEQ ID NO: 573 - DNA, 21 bp, synthetic construct
  source 1..21: mol_type = other DNA
  modified_base 1: mod_base = OTHER; note = uridine-3'-phosphate
  modified_base 2: mod_base = OTHER; note = uridine-3'-phosphate
  modified_base 3: mod_base = OTHER; note = cytidine-3'-phosphate
  modified_base 4: mod_base = OTHER; note = uridine-3'-phosphate
  modified_base 5: mod_base = OTHER; note = guanosine-3'-phosphate
  modified_base 6: mod_base = OTHER; note = cytidine-3'-phosphate
  modified_base 7: mod_base = OTHER; note = uridine-3'-phosphate
  modified_base 8: mod_base = OTHER; note = adenosine-3'-phosphate
  modified_base 9: mod_base = OTHER; note = uridine-3'-phosphate
  modified_base 10: mod_base = OTHER; note = adenosine-3'-phosphate
  modified_base 11: mod_base = OTHER; note = adenosine-3'-phosphate
  modified_base 12: mod_base = OTHER; note = cytidine-3'-phosphate
  modified_base 13: mod_base = OTHER; note = adenosine-3'-phosphate
  modified_base 14: mod_base = OTHER; note = guanosine-3'-phosphate
  modified_base 15: mod_base = OTHER; note = cytidine-3'-phosphate
  modified_base 16: mod_base = OTHER; note = cytidine-3'-phosphate
  modified_base 17: mod_base = OTHER; note = cytidine-3'-phosphate
  modified_base 18: mod_base = OTHER; note = uridine-3'-phosphate
  modified_base 19: mod_base = OTHER; note = adenosine-3'-phosphate
  misc_feature 1..19: note = RNA
  misc_feature 20..21: note = DNA
ttctgctataacagccctatt

SEQ ID NO: 574 - DNA, 21 bp, synthetic construct
  source 1..21: mol_type = other DNA
  modified_base 1: mod_base = OTHER; note = cytidine-3'-phosphate
  modified_base 2: mod_base = OTHER; note = cytidine-3'-phosphate
  modified_base 3: mod_base = OTHER; note = cytidine-3'-phosphate
  modified_base 4: mod_base = OTHER; note = uridine-3'-phosphate
  modified_base 5: mod_base = OTHER; note = adenosine-3'-phosphate
  modified_base 6: mod_base = OTHER; note = guanosine-3'-phosphate
  modified_base 7: mod_base = OTHER; note = guanosine-3'-phosphate
  modified_base 8: mod_base = OTHER; note = cytidine-3'-phosphate
  modified_base 9: mod_base = OTHER; note = cytidine-3'-phosphate
  modified_base 10: mod_base = OTHER; note = adenosine-3'-phosphate
  modified_base 11: mod_base = OTHER; note = guanosine-3'-phosphate
  modified_base 12: mod_base = OTHER; note = guanosine-3'-phosphate
  modified_base 13: mod_base = OTHER; note = adenosine-3'-phosphate
  modified_base 14: mod_base = OTHER; note = adenosine-3'-phosphate
  modified_base 15: mod_base = OTHER; note = uridine-3'-phosphate
  modified_base 16: mod_base = OTHER; note = adenosine-3'-phosphate
  modified_base 17: mod_base = OTHER; note = uridine-3'-phosphate
  modified_base 18: mod_base = OTHER; note = guanosine-3'-phosphate
  modified_base 19: mod_base = OTHER; note = adenosine-3'-phosphate
  misc_feature 1..19: note = RNA
  misc_feature 20..21: note = DNA
ccctaggccaggaatatgatt

SEQ ID NO: 575 - DNA, 21 bp, synthetic construct
  source 1..21: mol_type = other DNA
  modified_base 1: mod_base = OTHER; note = cytidine-3'-phosphate
  modified_base 2: mod_base = OTHER; note = adenosine-3'-phosphate
  modified_base 3: mod_base = OTHER; note = guanosine-3'-phosphate
  modified_base 4: mod_base = OTHER; note = guanosine-3'-phosphate
  modified_base 5: mod_base = OTHER; note = adenosine-3'-phosphate
  modified_base 6: mod_base = OTHER; note = adenosine-3'-phosphate
  modified_base 7: mod_base = OTHER; note = uridine-3'-phosphate
  modified_base 8: mod_base = OTHER; note = adenosine-3'-phosphate
  modified_base 9: mod_base = OTHER; note = uridine-3'-phosphate
  modified_base 10: mod_base = OTHER; note = guanosine-3'-phosphate
  modified_base 11: mod_base = OTHER; note = adenosine-3'-phosphate
  modified_base 12: mod_base = OTHER; note = adenosine-3'-phosphate
  modified_base 13: mod_base = OTHER; note = cytidine-3'-phosphate
  modified_base 14: mod_base = OTHER; note = adenosine-3'-phosphate
  modified_base 15: mod_base = OTHER; note = adenosine-3'-phosphate
  modified_base 16: mod_base = OTHER; note = guanosine-3'-phosphate
  modified_base 17: mod_base = OTHER; note = cytidine-3'-phosphate
  modified_base 18: mod_base = OTHER; note = cytidine-3'-phosphate
  modified_base 19: mod_base = OTHER; note = adenosine-3'-phosphate
  misc_feature 1..19: note = RNA
  misc_feature 20..21: note = DNA
caggaatatgaacaagccatt

SEQ ID NO: 576 - DNA, 21 bp, synthetic construct
  source 1..21: mol_type = other DNA
  modified_base 1: mod_base = OTHER; note = adenosine-3'-phosphate
  modified_base 2: mod_base = OTHER; note = guanosine-3'-phosphate
  modified_base 3: mod_base = OTHER; note = cytidine-3'-phosphate
  modified_base 4: mod_base = OTHER; note = cytidine-3'-phosphate
  modified_base 5: mod_base = OTHER; note = guanosine-3'-phosphate
  modified_base 6: mod_base = OTHER; note = cytidine-3'-phosphate
  modified_base 7: mod_base = OTHER; note = uridine-3'-phosphate
  modified_base 8: mod_base = OTHER; note = guanosine-3'-phosphate
  modified_base 9: mod_base = OTHER; note = cytidine-3'-phosphate
  modified_base 10: mod_base = OTHER; note = uridine-3'-phosphate
  modified_base 11: mod_base = OTHER; note = uridine-3'-phosphate
  modified_base 12: mod_base = OTHER; note = uridine-3'-phosphate
  modified_base 13: mod_base = OTHER; note = guanosine-3'-phosphate
  modified_base 14: mod_base = OTHER; note = guanosine-3'-phosphate
  modified_base 15: mod_base = OTHER; note = adenosine-3'-phosphate
  modified_base 16: mod_base = OTHER; note = uridine-3'-phosphate
  modified_base 17: mod_base = OTHER; note = cytidine-3'-phosphate
  modified_base 18: mod_base = OTHER; note = uridine-3'-phosphate
  modified_base 19: mod_base = OTHER; note = adenosine-3'-phosphate
  misc_feature 1..19: note = RNA
  misc_feature 20..21: note = DNA
agccgctgctttggatctatt

SEQ ID NO: 577 - DNA, 21 bp, synthetic construct
  source 1..21: mol_type = other DNA
  modified_base 1: mod_base = OTHER; note = adenosine-3'-phosphate
  modified_base 2: mod_base = OTHER; note = uridine-3'-phosphate
  modified_base 3: mod_base = OTHER; note = cytidine-3'-phosphate
  modified_base 4: mod_base = OTHER; note = uridine-3'-phosphate
  modified_base 5: mod_base = OTHER; note = cytidine-3'-phosphate
  modified_base 6: mod_base = OTHER; note = uridine-3'-phosphate
  modified_base 7: mod_base = OTHER; note = guanosine-3'-phosphate
  modified_base 8: mod_base = OTHER; note = uridine-3'-phosphate
  modified_base 9: mod_base = OTHER; note = cytidine-3'-phosphate
  modified_base 10: mod_base = OTHER; note = cytidine-3'-phosphate
  modified_base 11: mod_base = OTHER; note = uridine-3'-phosphate
  modified_base 12: mod_base = OTHER; note = cytidine-3'-phosphate
  modified_base 13: mod_base = OTHER; note = adenosine-3'-phosphate
  modified_base 14: mod_base = OTHER; note = cytidine-3'-phosphate
  modified_base 15: mod_base = OTHER; note = cytidine-3'-phosphate
  modified_base 16: mod_base = OTHER; note = adenosine-3'-phosphate
  modified_base 17: mod_base = OTHER; note = guanosine-3'-phosphate
  modified_base 18: mod_base = OTHER; note = cytidine-3'-phosphate
  modified_base 19: mod_base = OTHER; note = adenosine-3'-phosphate
  misc_feature 1..19: note = RNA
  misc_feature 20..21: note = DNA
atctctgtcctcaccagcatt

SEQ ID NO: 578 - DNA, 21 bp, synthetic construct
  source 1..21: mol_type = other DNA
  modified_base 1: mod_base = OTHER; note = cytidine-3'-phosphate
  modified_base 2: mod_base = OTHER; note = adenosine-3'-phosphate
  modified_base 3: mod_base = OTHER; note = guanosine-3'-phosphate
  modified_base 4: mod_base = OTHER; note = cytidine-3'-phosphate
  modified_base 5: mod_base = OTHER; note = cytidine-3'-phosphate
  modified_base 6: mod_base = OTHER; note = uridine-3'-phosphate
  modified_base 7: mod_base = OTHER; note = cytidine-3'-phosphate
  modified_base 8: mod_base = OTHER; note = cytidine-3'-phosphate
  modified_base 9: mod_base = OTHER; note = uridine-3'-phosphate
  modified_base 10: mod_base = OTHER; note = guanosine-3'-phosphate
  modified_base 11: mod_base = OTHER; note = guanosine-3'-phosphate
  modified_base 12: mod_base = OTHER; note = adenosine-3'-phosphate
  modified_base 13: mod_base = OTHER; note = adenosine-3'-phosphate
  modified_base 14: mod_base = OTHER; note = guanosine-3'-phosphate
  modified_base 15: mod_base = OTHER; note = cytidine-3'-phosphate
  modified_base 16: mod_base = OTHER; note = cytidine-3'-phosphate
  modified_base 17: mod_base = OTHER; note = uridine-3'-phosphate
  modified_base 18: mod_base = OTHER; note = uridine-3'-phosphate
  modified_base 19: mod_base = OTHER; note = uridine-3'-phosphate
  misc_feature 1..19: note = RNA
  misc_feature 20..21: note = DNA
cagcctcctggaagccttttt

SEQ ID NO: 579 - DNA, 21 bp, synthetic construct
  source 1..21: mol_type = other DNA
  modified_base 1: mod_base = OTHER; note = uridine-3'-phosphate
  modified_base 2: mod_base = OTHER; note = uridine-3'-phosphate
  modified_base 3: mod_base = OTHER; note = uridine-3'-phosphate
  modified_base 4: mod_base = OTHER; note = guanosine-3'-phosphate
  modified_base 5: mod_base = OTHER; note = cytidine-3'-phosphate
  modified_base 6: mod_base = OTHER; note = uridine-3'-phosphate
  modified_base 7: mod_base = OTHER; note = cytidine-3'-phosphate
  modified_base 8: mod_base = OTHER; note = adenosine-3'-phosphate
  modified_base 9: mod_base = OTHER; note = cytidine-3'-phosphate
  modified_base 10: mod_base = OTHER; note = adenosine-3'-phosphate
  modified_base 11: mod_base = OTHER; note = cytidine-3'-phosphate
  modified_base 12: mod_base = OTHER; note = adenosine-3'-phosphate
  modified_base 13: mod_base = OTHER; note = guanosine-3'-phosphate
  modified_base 14: mod_base = OTHER; note = adenosine-3'-phosphate
  modified_base 15: mod_base = OTHER; note = cytidine-3'-phosphate
  modified_base 16: mod_base = OTHER; note = cytidine-3'-phosphate
  modified_base 17: mod_base = OTHER; note = uridine-3'-phosphate
  modified_base 18: mod_base = OTHER; note = cytidine-3'-phosphate
  modified_base 19: mod_base = OTHER; note = adenosine-3'-phosphate
  misc_feature 1..19: note = RNA
  misc_feature 20..21: note = DNA
tttgctcacacagacctcatt

SEQ ID NO: 580 - DNA, 21 bp, synthetic construct
  source 1..21: mol_type = other DNA
  modified_base 1: mod_base = OTHER; note = cytidine-3'-phosphate
  modified_base 2: mod_base = OTHER; note = cytidine-3'-phosphate
  modified_base 3: mod_base = OTHER; note = uridine-3'-phosphate
  modified_base 4: mod_base = OTHER; note = cytidine-3'-phosphate
  modified_base 5: mod_base = OTHER; note = adenosine-3'-phosphate
  modified_base 6: mod_base = OTHER; note = guanosine-3'-phosphate
  modified_base 7: mod_base = OTHER; note = uridine-3'-phosphate
  modified_base 8: mod_base = OTHER; note = guanosine-3'-phosphate
  modified_base 9: mod_base = OTHER; note = guanosine-3'-phosphate
  modified_base 10: mod_base = OTHER; note = guanosine-3'-phosphate
  modified_base 11: mod_base = OTHER; note = adenosine-3'-phosphate
  modified_base 12: mod_base = OTHER; note = adenosine-3'-phosphate
  modified_base 13: mod_base = OTHER; note = guanosine-3'-phosphate
  modified_base 14: mod_base = OTHER; note = guanosine-3'-phosphate
  modified_base 15: mod_base = OTHER; note = uridine-3'-phosphate
  modified_base 16: mod_base = OTHER; note = guanosine-3'-phosphate
  modified_base 17: mod_base = OTHER; note = uridine-3'-phosphate
  modified_base 18: mod_base = OTHER; note = uridine-3'-phosphate
  modified_base 19: mod_base = OTHER; note = uridine-3'-phosphate
  misc_feature 1..19: note = RNA
  misc_feature 20..21: note = DNA
cctcagtgggaaggtgttttt

SEQ ID NO: 581 - DNA, 21 bp, synthetic construct
  source 1..21: mol_type = other DNA
  modified_base 1: mod_base = OTHER; note = guanosine-3'-phosphate
  modified_base 2: mod_base = OTHER; note = guanosine-3'-phosphate
  modified_base 3: mod_base = OTHER; note = adenosine-3'-phosphate
  modified_base 4: mod_base = OTHER; note = adenosine-3'-phosphate
  modified_base 5: mod_base = OTHER; note = guanosine-3'-phosphate
  modified_base 6: mod_base = OTHER; note = guanosine-3'-phosphate
  modified_base 7: mod_base = OTHER; note = uridine-3'-phosphate
  modified_base 8: mod_base = OTHER; note = guanosine-3'-phosphate
  modified_base 9: mod_base = OTHER; note = uridine-3'-phosphate
  modified_base 10: mod_base = OTHER; note = uridine-3'-phosphate
  modified_base 11: mod_base = OTHER; note = uridine-3'-phosphate
  modified_base 12: mod_base = OTHER; note = guanosine-3'-phosphate
  modified_base 13: mod_base = OTHER; note = uridine-3'-phosphate
  modified_base 14: mod_base = OTHER; note = adenosine-3'-phosphate
  modified_base 15: mod_base = OTHER; note = uridine-3'-phosphate
  modified_base 16: mod_base = OTHER; note = uridine-3'-phosphate
  modified_base 17: mod_base = OTHER; note = uridine-3'-phosphate
  modified_base 18: mod_base = OTHER; note = cytidine-3'-phosphate
  modified_base 19: mod_base = OTHER; note = adenosine-3'-phosphate
  misc_feature 1..19: note = RNA
  misc_feature 20..21: note = DNA
ggaaggtgtttgtatttcatt

SEQ ID NO: 582 - DNA, 21 bp, synthetic construct
  source 1..21: mol_type = other DNA
  modified_base 1: mod_base = OTHER; note = uridine-3'-phosphate
  modified_base 2: mod_base = OTHER; note = uridine-3'-phosphate
  modified_base 3: mod_base = OTHER; note = cytidine-3'-phosphate
  modified_base 4: mod_base = OTHER; note = cytidine-3'-phosphate
  modified_base 5: mod_base = OTHER; note = uridine-3'-phosphate
  modified_base 6: mod_base = OTHER; note = adenosine-3'-phosphate
  modified_base 7: mod_base = OTHER; note = guanosine-3'-phosphate
  modified_base 8: mod_base = OTHER; note = adenosine-3'-phosphate
  modified_base 9: mod_base = OTHER; note = guanosine-3'-phosphate
  modified_base 10: mod_base = OTHER; note = adenosine-3'-phosphate
  modified_base 11: mod_base = OTHER; note = adenosine-3'-phosphate
  modified_base 12: mod_base = OTHER; note = uridine-3'-phosphate
  modified_base 13: mod_base = OTHER; note = cytidine-3'-phosphate
  modified_base 14: mod_base = OTHER; note = uridine-3'-phosphate
  modified_base 15: mod_base = OTHER; note = guanosine-3'-phosphate
  modified_base 16: mod_base = OTHER; note = uridine-3'-phosphate
  modified_base 17: mod_base = OTHER; note = uridine-3'-phosphate
  modified_base 18: mod_base = OTHER; note = adenosine-3'-phosphate
  modified_base 19: mod_base = OTHER; note = adenosine-3'-phosphate
  misc_feature 1..19: note = RNA
  misc_feature 20..21: note = DNA
ttcctagagaatctgttaatt

SEQ ID NO: 583 - DNA, 21 bp, synthetic construct
  source 1..21: mol_type = other DNA
  modified_base 1: mod_base = OTHER; note = uridine-3'-phosphate
  modified_base 2: mod_base = OTHER; note = uridine-3'-phosphate
  modified_base 3: mod_base = OTHER; note = adenosine-3'-phosphate
  modified_base 4: mod_base = OTHER; note = cytidine-3'-phosphate
  modified_base 5: mod_base = OTHER; note = uridine-3'-phosphate
  modified_base 6: mod_base = OTHER; note = guanosine-3'-phosphate
  modified_base 7: mod_base = OTHER; note = adenosine-3'-phosphate
  modified_base 8: mod_base = OTHER; note = uridine-3'-phosphate
  modified_base 9: mod_base = OTHER; note = cytidine-3'-phosphate
  modified_base 10: mod_base = OTHER; note = adenosine-3'-phosphate
  modified_base 11: mod_base = OTHER; note = uridine-3'-phosphate
  modified_base 12: mod_base = OTHER; note = guanosine-3'-phosphate
  modified_base 13: mod_base = OTHER; note = uridine-3'-phosphate
  modified_base 14: mod_base = OTHER; note = adenosine-3'-phosphate
  modified_base 15: mod_base = OTHER; note = adenosine-3'-phosphate
  modified_base 16: mod_base = OTHER; note = adenosine-3'-phosphate
  modified_base 17: mod_base = OTHER; note = cytidine-3'-phosphate
  modified_base 18: mod_base = OTHER; note = uridine-3'-phosphate
  modified_base 19: mod_base = OTHER; note = uridine-3'-phosphate
  misc_feature 1..19: note = RNA
  misc_feature 20..21: note = DNA
ttactgatcatgtaaactttt

SEQ ID NO: 584 - DNA, 21 bp, synthetic construct
  source 1..21: mol_type = other DNA
  modified_base 1: mod_base = OTHER; note = adenosine-3'-phosphate
  modified_base 2: mod_base = OTHER; note = adenosine-3'-phosphate
  modified_base 3: mod_base = OTHER; note = cytidine-3'-phosphate
  modified_base 4: mod_base = OTHER; note = uridine-3'-phosphate
  modified_base 5: mod_base = OTHER; note = uridine-3'-phosphate
  modified_base 6: mod_base = OTHER; note = guanosine-3'-phosphate
  modified_base 7: mod_base = OTHER; note = adenosine-3'-phosphate
  modified_base 8: mod_base = OTHER; note = uridine-3'-phosphate
  modified_base 9: mod_base = OTHER; note = cytidine-3'-phosphate
  modified_base 10: mod_base = OTHER; note = adenosine-3'-phosphate
  modified_base 11: mod_base = OTHER; note = cytidine-3'-phosphate
  modified_base 12: mod_base = OTHER; note = adenosine-3'-phosphate
  modified_base 13: mod_base = OTHER; note = cytidine-3'-phosphate
  modified_base 14: mod_base = OTHER; note = cytidine-3'-phosphate
  modified_base 15: mod_base = OTHER; note = guanosine-3'-phosphate
  modified_base 16: mod_base = OTHER; note = cytidine-3'-phosphate
  modified_base 17: mod_base = OTHER; note = uridine-3'-phosphate
  modified_base 18: mod_base = OTHER; note = guanosine-3'-phosphate
  modified_base 19: mod_base = OTHER; note = adenosine-3'-phosphate
  misc_feature 1..19: note = RNA
  misc_feature 20..21: note = DNA
aacttgatcacaccgctgatt

SEQ ID NO: 585 - DNA, 21 bp, synthetic construct
  source 1..21: mol_type = other DNA
  modified_base 1: mod_base = OTHER; note = guanosine-3'-phosphate
  modified_base 2: mod_base = OTHER; note = cytidine-3'-phosphate
  modified_base 3: mod_base = OTHER; note = uridine-3'-phosphate
  modified_base 4: mod_base = OTHER; note = guanosine-3'-phosphate
  modified_base 5: mod_base = OTHER; note = guanosine-3'-phosphate
  modified_base 6: mod_base = OTHER; note = adenosine-3'-phosphate
  modified_base 7: mod_base = OTHER; note = guanosine-3'-phosphate
  modified_base 8: mod_base = OTHER; note = adenosine-3'-phosphate
  modified_base 9: mod_base = OTHER; note = adenosine-3'-phosphate
  modified_base 10: mod_base = OTHER; note = guanosine-3'-phosphate
  modified_base 11: mod_base = OTHER; note = cytidine-3'-phosphate
  modified_base 12: mod_base = OTHER; note = cytidine-3'-phosphate
  modified_base 13: mod_base = OTHER; note = uridine-3'-phosphate
  modified_base 14: mod_base = OTHER; note = cytidine-3'-phosphate
  modified_base 15: mod_base = OTHER; note = uridine-3'-phosphate
  modified_base 16: mod_base = OTHER; note = adenosine-3'-phosphate
  modified_base 17: mod_base = OTHER; note = cytidine-3'-phosphate
  modified_base 18: mod_base = OTHER; note = adenosine-3'-phosphate
  modified_base 19: mod_base = OTHER; note = adenosine-3'-phosphate
  misc_feature 1..19: note = RNA
  misc_feature 20..21: note = DNA
gctggagaagcctctacaatt

SEQ ID NO: 586 - DNA, 21 bp, synthetic construct
  source 1..21: mol_type = other DNA
  modified_base 1: mod_base = OTHER; note = uridine-3'-phosphate
  modified_base 2: mod_base = OTHER; note = adenosine-3'-phosphate
  modified_base 3: mod_base = OTHER; note = cytidine-3'-phosphate
  modified_base 4: mod_base = OTHER; note = adenosine-3'-phosphate
  modified_base 5: mod_base = OTHER; note = guanosine-3'-phosphate
  modified_base 6: mod_base = OTHER; note = adenosine-3'-phosphate
  modified_base 7: mod_base = OTHER; note = adenosine-3'-phosphate
  modified_base 8: mod_base = OTHER; note = cytidine-3'-phosphate
  modified_base 9: mod_base = OTHER; note = uridine-3'-phosphate
  modified_base 10: mod_base = OTHER; note = uridine-3'-phosphate
  modified_base 11: mod_base = OTHER; note = uridine-3'-phosphate
  modified_base 12: mod_base = OTHER; note = adenosine-3'-phosphate
  modified_base 13: mod_base = OTHER; note = cytidine-3'-phosphate
  modified_base 14: mod_base = OTHER; note = cytidine-3'-phosphate
  modified_base 15: mod_base = OTHER; note = uridine-3'-phosphate
  modified_base 16: mod_base = OTHER; note = uridine-3'-phosphate
  modified_base 17: mod_base = OTHER; note = guanosine-3'-phosphate
  modified_base 18: mod_base = OTHER; note = uridine-3'-phosphate
  modified_base 19: mod_base = OTHER; note = adenosine-3'-phosphate
  misc_feature 1..19: note = RNA
  misc_feature 20..21: note = DNA
tacagaactttaccttgtatt

SEQ ID NO: 587 - DNA, 21 bp, synthetic construct
  source 1..21: mol_type = other DNA
  modified_base 1: mod_base = OTHER; note = adenosine-3'-phosphate
  modified_base 2: mod_base = OTHER; note = cytidine-3'-phosphate
  modified_base 3: mod_base = OTHER; note = uridine-3'-phosphate
  modified_base 4: mod_base = OTHER; note = uridine-3'-phosphate
  modified_base 5: mod_base = OTHER; note = uridine-3'-phosphate
  modified_base 6: mod_base = OTHER; note = adenosine-3'-phosphate
  modified_base 7: mod_base = OTHER; note = cytidine-3'-phosphate
  modified_base 8: mod_base = OTHER; note = cytidine-3'-phosphate
  modified_base 9: mod_base = OTHER; note = uridine-3'-phosphate
  modified_base 10: mod_base = OTHER; note = uridine-3'-phosphate
  modified_base 11: mod_base = OTHER; note = guanosine-3'-phosphate
  modified_base 12: mod_base = OTHER; note = uridine-3'-phosphate
  modified_base 13: mod_base = OTHER; note = guanosine-3'-phosphate
  modified_base 14: mod_base = OTHER; note = uridine-3'-phosphate
  modified_base 15: mod_base = OTHER; note = uridine-3'-phosphate
  modified_base 16: mod_base = OTHER; note = uridine-3'-phosphate
  modified_base 17: mod_base = OTHER; note = uridine-3'-phosphate
  modified_base 18: mod_base = OTHER; note = cytidine-3'-phosphate
  modified_base 19: mod_base = OTHER; note = adenosine-3'-phosphate
  misc_feature 1..19: note = RNA
  misc_feature 20..21: note = DNA
actttaccttgtgttttcatt

SEQ ID NO: 588 - DNA, 21 bp, synthetic construct
  source 1..21: mol_type = other DNA
  modified_base 1: mod_base = OTHER; note = uridine-3'-phosphate
  modified_base 2: mod_base = OTHER; note = uridine-3'-phosphate
  modified_base 3: mod_base = OTHER; note = cytidine-3'-phosphate
  modified_base 4: mod_base = OTHER; note = guanosine-3'-phosphate
  modified_base 5: mod_base = OTHER; note = adenosine-3'-phosphate
  modified_base 6: mod_base = OTHER; note = guanosine-3'-phosphate
  modified_base 7: mod_base = OTHER; note = cytidine-3'-phosphate
  modified_base 8: mod_base = OTHER; note = cytidine-3'-phosphate
  modified_base 9: mod_base = OTHER; note = uridine-3'-phosphate
  modified_base 10: mod_base = OTHER; note = adenosine-3'-phosphate
  modified_base 11: mod_base = OTHER; note = uridine-3'-phosphate
  modified_base 12: mod_base = OTHER; note = adenosine-3'-phosphate
  modified_base 13: mod_base = OTHER; note = guanosine-3'-phosphate
  modified_base 14: mod_base = OTHER; note = uridine-3'-phosphate
  modified_base 15: mod_base = OTHER; note = guanosine-3'-phosphate
  modified_base 16: mod_base = OTHER; note = adenosine-3'-phosphate
  modified_base 17: mod_base = OTHER; note = uridine-3'-phosphate
  modified_base 18: mod_base = OTHER; note = cytidine-3'-phosphate
  modified_base 19: mod_base = OTHER; note = uridine-3'-phosphate
  misc_feature 1..19: note = RNA
  misc_feature 20..21: note = DNA
ttcgagcctatagtgatcttt

SEQ ID NO: 589 - DNA, 21 bp, synthetic construct
  source 1..21: mol_type = other DNA
  modified_base 1: mod_base = OTHER; note = guanosine-3'-phosphate
  modified_base 2: mod_base = OTHER; note = adenosine-3'-phosphate
  modified_base 3: mod_base = OTHER; note = uridine-3'-phosphate
  modified_base 4: mod_base = OTHER; note = cytidine-3'-phosphate
  modified_base 5: mod_base = OTHER; note = uridine-3'-phosphate
  modified_base 6: mod_base = OTHER; note = cytidine-3'-phosphate
  modified_base 7: mod_base = OTHER; note = uridine-3'-phosphate
  modified_base 8: mod_base = OTHER; note = cytidine-3'-phosphate
  modified_base 9: mod_base = OTHER; note = uridine-3'-phosphate
  modified_base 10: mod_base = OTHER; note = cytidine-3'-phosphate
  modified_base 11: mod_base = OTHER; note = guanosine-3'-phosphate
  modified_base 12: mod_base = OTHER; note = uridine-3'-phosphate
  modified_base 13: mod_base = OTHER; note = guanosine-3'-phosphate
  modified_base 14: mod_base = OTHER; note = cytidine-3'-phosphate
  modified_base 15: mod_base = OTHER; note = cytidine-3'-phosphate
  modified_base 16: mod_base = OTHER; note = uridine-3'-phosphate
  modified_base 17: mod_base = OTHER; note = adenosine-3'-phosphate
  modified_base 18: mod_base = OTHER; note = cytidine-3'-phosphate
  modified_base 19: mod_base = OTHER; note = adenosine-3'-phosphate
  misc_feature 1..19: note = RNA
  misc_feature 20..21: note = DNA
gatctctctcgtgcctacatt

SEQ ID NO: 590 - DNA, 21 bp, synthetic construct
  source 1..21: mol_type = other DNA
  modified_base 1: mod_base = OTHER; note = uridine-3'-phosphate
  modified_base 2: mod_base = OTHER; note = cytidine-3'-phosphate
  modified_base 3: mod_base = OTHER; note = uridine-3'-phosphate
  modified_base 4: mod_base = OTHER; note = cytidine-3'-phosphate
  modified_base 5: mod_base = OTHER; note = guanosine-3'-phosphate
  modified_base 6: mod_base = OTHER; note = uridine-3'-phosphate
  modified_base 7: mod_base = OTHER; note = guanosine-3'-phosphate
  modified_base 8: mod_base = OTHER; note = cytidine-3'-phosphate
  modified_base 9: mod_base = OTHER; note = cytidine-3'-phosphate
  modified_base 10: mod_base = OTHER; note = uridine-3'-phosphate
  modified_base 11: mod_base = OTHER; note = adenosine-3'-phosphate
  modified_base 12: mod_base = OTHER; note = cytidine-3'-phosphate
  modified_base 13: mod_base = OTHER; note = adenosine-3'-phosphate
  modified_base 14: mod_base = OTHER; note = guanosine-3'-phosphate
  modified_base 15: mod_base = OTHER; note = cytidine-3'-phosphate
  modified_base 16: mod_base = OTHER; note = cytidine-3'-phosphate
  modified_base 17: mod_base = OTHER; note = uridine-3'-phosphate
  modified_base 18: mod_base = OTHER; note = cytidine-3'-phosphate
  modified_base 19: mod_base = OTHER; note = uridine-3'-phosphate
  misc_feature 1..19: note = RNA
  misc_feature 20..21: note = DNA
tctcgtgcctacagcctcttt

SEQ ID NO: 591 - DNA, 21 bp, synthetic construct
  source 1..21: mol_type = other DNA
  modified_base 1: mod_base = OTHER; note = cytidine-3'-phosphate
  modified_base 2: mod_base = OTHER; note = adenosine-3'-phosphate
  modified_base 3: mod_base = OTHER; note = guanosine-3'-phosphate
  modified_base 4: mod_base = OTHER; note = cytidine-3'-phosphate
  modified_base 5: mod_base = OTHER; note = cytidine-3'-phosphate
  modified_base 6: mod_base = OTHER; note = uridine-3'-phosphate
  modified_base 7: mod_base = OTHER; note = cytidine-3'-phosphate
  modified_base 8: mod_base = OTHER; note = uridine-3'-phosphate
  modified_base 9: mod_base = OTHER; note = uridine-3'-phosphate
  modified_base 10: mod_base = OTHER; note = cytidine-3'-phosphate
  modified_base 11: mod_base = OTHER; note = uridine-3'-phosphate
  modified_base 12: mod_base = OTHER; note = cytidine-3'-phosphate
  modified_base 13: mod_base = OTHER; note = cytidine-3'-phosphate
  modified_base 14: mod_base = OTHER; note = uridine-3'-phosphate
  modified_base 15: mod_base = OTHER; note = adenosine-3'-phosphate
  modified_base 16: mod_base = OTHER; note = cytidine-3'-phosphate
  modified_base 17: mod_base = OTHER; note = adenosine-3'-phosphate
  modified_base 18: mod_base = OTHER; note = adenosine-3'-phosphate
  modified_base 19: mod_base = OTHER; note = uridine-3'-phosphate
  misc_feature 1..19: note = RNA
  misc_feature 20..21: note = DNA
cagcctcttctcctacaattt

SEQ ID NO: 592 - DNA, 21 bp, synthetic construct
  source 1..21: mol_type = other DNA
  modified_base 1: mod_base = OTHER; note = cytidine-3'-phosphate
  modified_base 2: mod_base = OTHER; note = adenosine-3'-phosphate
  modified_base 3: mod_base = OTHER; note = adenosine-3'-phosphate
  modified_base 4: mod_base = OTHER; note = uridine-3'-phosphate
  modified_base 5: mod_base = OTHER; note = adenosine-3'-phosphate
  modified_base 6: mod_base = OTHER; note = cytidine-3'-phosphate
  modified_base 7: mod_base = OTHER; note = cytidine-3'-phosphate
  modified_base 8: mod_base = OTHER; note = cytidine-3'-phosphate
  modified_base 9: mod_base = OTHER; note = adenosine-3'-phosphate
  modified_base 10: mod_base = OTHER; note = adenosine-3'-phosphate
  modified_base 11: mod_base = OTHER; note = guanosine-3'-phosphate
  modified_base 12: mod_base = OTHER; note = guanosine-3'-phosphate
  modified_base 13: mod_base = OTHER; note = cytidine-3'-phosphate
  modified_base 14: mod_base = OTHER; note = adenosine-3'-phosphate
  modified_base 15: mod_base = OTHER; note = guanosine-3'-phosphate
  modified_base 16: mod_base = OTHER; note = guanosine-3'-phosphate
  modified_base 17: mod_base = OTHER; note = guanosine-3'-phosphate
  modified_base 18: mod_base = OTHER; note = adenosine-3'-phosphate
  modified_base 19: mod_base = OTHER; note = uridine-3'-phosphate
  misc_feature 1..19: note = RNA
  misc_feature 20..21: note = DNA
caatacccaaggcagggattt

SEQ ID NO: 593 - DNA, 21 bp, synthetic construct
  source 1..21: mol_type = other DNA
  modified_base 1: mod_base = OTHER; note = guanosine-3'-phosphate
  modified_base 2: mod_base = OTHER; note = guanosine-3'-phosphate
  modified_base 3: mod_base = OTHER; note = guanosine-3'-phosphate
  modified_base 4: mod_base = OTHER; note = adenosine-3'-phosphate
  modified_base 5: mod_base = OTHER; note = uridine-3'-phosphate
  modified_base 6: mod_base = OTHER; note = adenosine-3'-phosphate
  modified_base 7: mod_base = OTHER; note = adenosine-3'-phosphate
  modified_base 8: mod_base = OTHER; note = uridine-3'-phosphate
  modified_base 9: mod_base = OTHER; note = guanosine-3'-phosphate
  modified_base 10: mod_base = OTHER; note = adenosine-3'-phosphate
  modified_base 11: mod_base = OTHER; note = guanosine-3'-phosphate
  modified_base 12: mod_base = OTHER; note = cytidine-3'-phosphate
  modified_base 13: mod_base = OTHER; note = uridine-3'-phosphate
  modified_base 14: mod_base = OTHER; note = adenosine-3'-phosphate
  modified_base 15: mod_base = OTHER; note = cytidine-3'-phosphate
  modified_base 16: mod_base = OTHER; note = uridine-3'-phosphate
  modified_base 17: mod_base = OTHER; note = adenosine-3'-phosphate
  modified_base 18: mod_base = OTHER; note = guanosine-3'-phosphate
  modified_base 19: mod_base = OTHER; note = uridine-3'-phosphate
  misc_feature 1..19: note = RNA
  misc_feature 20..21: note = DNA
gggataatgagctactagttt

SEQ ID NO: 594 - DNA, 21 bp, synthetic construct
  source 1..21: mol_type = other DNA
  modified_base 1: mod_base = OTHER; note = uridine-3'-phosphate
  modified_base 2: mod_base = OTHER; note = adenosine-3'-phosphate
  modified_base 3: mod_base = OTHER; note = guanosine-3'-phosphate
  modified_base 4: mod_base = OTHER; note = uridine-3'-phosphate
  modified_base 5: mod_base = OTHER; note = uridine-3'-phosphate
  modified_base 6: mod_base = OTHER; note = uridine-3'-phosphate
  modified_base 7: mod_base = OTHER; note = adenosine-3'-phosphate
  modified_base 8: mod_base = OTHER; note = uridine-3'-phosphate
  modified_base 9: mod_base = OTHER; note = adenosine-3'-phosphate
  modified_base 10: mod_base = OTHER; note = adenosine-3'-phosphate
  modified_base 11: mod_base = OTHER; note = adenosine-3'-phosphate
  modified_base 12: mod_base = OTHER; note = guanosine-3'-phosphate
  modified_base 13: mod_base = OTHER; note = adenosine-3'-phosphate
  modified_base 14: mod_base = OTHER; note = adenosine-3'-phosphate
  modified_base 15: mod_base = OTHER; note = adenosine-3'-phosphate
  modified_base 16: mod_base = OTHER; note = guanosine-3'-phosphate
  modified_base 17: mod_base = OTHER; note = adenosine-3'-phosphate
  modified_base 18: mod_base = OTHER; note = guanosine-3'-phosphate
  modified_base 19: mod_base = OTHER; note = uridine-3'-phosphate
  misc_feature 1..19: note = RNA
  misc_feature 20..21: note = DNA
tagtttataaagaaagagttt

SEQ ID NO: 595 - DNA, 21 bp, synthetic construct
  source 1..21: mol_type = other DNA
  modified_base 1: mod_base = OTHER; note = adenosine-3'-phosphate
  modified_base 2: mod_base = OTHER; note = guanosine-3'-phosphate
  modified_base 3: mod_base = OTHER; note = adenosine-3'-phosphate
  modified_base 4: mod_base = OTHER; note = guanosine-3'-phosphate
  modified_base 5: mod_base = OTHER; note = uridine-3'-phosphate
  modified_base 6: mod_base = OTHER; note = uridine-3'-phosphate
  modified_base 7: mod_base = OTHER; note = guanosine-3'-phosphate
  modified_base 8: mod_base = OTHER; note = guanosine-3'-phosphate
  modified_base 9: mod_base = OTHER; note = adenosine-3'-phosphate
  modified_base 10: mod_base = OTHER; note = guanosine-3'-phosphate
  modified_base 11: mod_base = OTHER; note = adenosine-3'-phosphate
  modified_base 12: mod_base = OTHER; note = guanosine-3'-phosphate
  modified_base 13: mod_base = OTHER; note = uridine-3'-phosphate
  modified_base 14: mod_base = OTHER; note = adenosine-3'-phosphate
  modified_base 15: mod_base = OTHER; note = uridine-3'-phosphate
  modified_base 16: mod_base = OTHER; note = adenosine-3'-phosphate
  modified_base 17: mod_base = OTHER; note = guanosine-3'-phosphate
  modified_base 18: mod_base = OTHER; note = uridine-3'-phosphate
  modified_base 19: mod_base = OTHER; note = adenosine-3'-phosphate
  misc_feature 1..19: note = RNA
  misc_feature 20..21: note = DNA
agagttggagagtatagtatt

SEQ ID NO: 596 - DNA, 21 bp, synthetic construct
  source 1..21: mol_type = other DNA
  modified_base 1: mod_base = OTHER; note = uridine-3'-phosphate
  modified_base 2: mod_base = OTHER; note = adenosine-3'-phosphate
  modified_base 3: mod_base = OTHER; note = guanosine-3'-phosphate
  modified_base 4: mod_base = OTHER; note = uridine-3'-phosphate
  modified_base 5: mod_base = OTHER; note = cytidine-3'-phosphate
  modified_base 6: mod_base = OTHER; note = uridine-3'-phosphate
  modified_base 7: mod_base = OTHER; note = adenosine-3'-phosphate
  modified_base 8: mod_base = OTHER; note = uridine-3'-phosphate
  modified_base 9: mod_base = OTHER; note = adenosine-3'-phosphate
  modified_base 10: mod_base = OTHER; note = cytidine-3'-phosphate
  modified_base 11: mod_base = OTHER; note = adenosine-3'-phosphate
  modified_base 12: mod_base = OTHER; note = uridine-3'-phosphate
  modified_base 13: mod_base = OTHER; note = uridine-3'-phosphate
  modified_base 14: mod_base = OTHER; note = guanosine-3'-phosphate
  modified_base 15: mod_base = OTHER; note = guanosine-3'-phosphate
  modified_base 16: mod_base = OTHER; note = adenosine-3'-phosphate
  modified_base 17: mod_base = OTHER; note = adenosine-3'-phosphate
  modified_base 18: mod_base = OTHER; note = guanosine-3'-phosphate
  modified_base 19: mod_base = OTHER; note = adenosine-3'-phosphate
  misc_feature 1..19: note = RNA
  misc_feature 20..21: note = DNA
tagtctatacattggaagatt

SEQ ID NO: 597 - DNA, 21 bp, synthetic construct
  source 1..21: mol_type = other DNA
  modified_base 1: mod_base = OTHER; note = uridine-3'-phosphate
  modified_base 2: mod_base = OTHER; note = uridine-3'-phosphate
  modified_base 3: mod_base = OTHER; note = guanosine-3'-phosphate
  modified_base 4: mod_base = OTHER; note = guanosine-3'-phosphate
  modified_base 5: mod_base = OTHER; note = adenosine-3'-phosphate
  modified_base 6: mod_base = OTHER; note = adenosine-3'-phosphate
  modified_base 7: mod_base = OTHER; note = guanosine-3'-phosphate
  modified_base 8: mod_base = OTHER; note = adenosine-3'-phosphate
  modified_base 9: mod_base = OTHER; note = cytidine-3'-phosphate
  modified_base 10: mod_base = OTHER; note = adenosine-3'-phosphate
  modified_base 11: mod_base = OTHER; note = cytidine-3'-phosphate
  modified_base 12: mod_base = OTHER; note = adenosine-3'-phosphate
  modified_base 13: mod_base = OTHER; note = adenosine-3'-phosphate
  modified_base 14: mod_base = OTHER; note = adenosine-3'-phosphate
  modified_base 15: mod_base = OTHER; note = guanosine-3'-phosphate
  modified_base 16: mod_base = OTHER; note = uridine-3'-phosphate
  modified_base 17: mod_base = OTHER; note = uridine-3'-phosphate
  modified_base 18: mod_base = OTHER; note = adenosine-3'-phosphate
  modified_base 19: mod_base = OTHER; note = adenosine-3'-phosphate
  misc_feature 1..19: note = RNA
  misc_feature 20..21: note = DNA
ttggaagacacaaagttaatt

SEQ ID NO: 598 - DNA, 21 bp, synthetic construct
  source 1..21: mol_type = other DNA
  modified_base 1: mod_base = OTHER; note = cytidine-3'-phosphate
  modified_base 2: mod_base = OTHER; note = adenosine-3'-phosphate
  modified_base 3: mod_base = OTHER; note = cytidine-3'-phosphate
  modified_base 4: mod_base = OTHER; note = adenosine-3'-phosphate
  modified_base 5: mod_base = OTHER; note = adenosine-3'-phosphate
  modified_base 6: mod_base = OTHER; note = adenosine-3'-phosphate
  modified_base 7: mod_base = OTHER; note = guanosine-3'-phosphate
  modified_base 8: mod_base = OTHER; note = uridine-3'-phosphate
  modified_base 9: mod_base = OTHER; note = uridine-3'-phosphate
  modified_base 10: mod_base = OTHER; note = adenosine-3'-phosphate
  modified_base 11: mod_base = OTHER; note = cytidine-3'-phosphate
  modified_base 12: mod_base = OTHER; note = adenosine-3'-phosphate
  modified_base 13: mod_base = OTHER; note = uridine-3'-phosphate
  modified_base 14: mod_base = OTHER; note = cytidine-3'-phosphate
  modified_base 15: mod_base = OTHER; note = cytidine-3'-phosphate
  modified_base 16: mod_base = OTHER; note = adenosine-3'-phosphate
  modified_base 17: mod_base = OTHER; note = adenosine-3'-phosphate
  modified_base 18: mod_base = OTHER; note = adenosine-3'-phosphate
  modified_base 19: mod_base = OTHER; note = guanosine-3'-phosphate
  misc_feature 1..19: note = RNA
  misc_feature 20..21: note = DNA
cacaaagttacatccaaagtt

SEQ ID NO: 599 - DNA, 21 bp, synthetic construct
  source 1..21: mol_type = other DNA
  modified_base 1: mod_base = OTHER; note = adenosine-3'-phosphate
  modified_base 2: mod_base = OTHER; note = adenosine-3'-phosphate
  modified_base 3: mod_base = OTHER; note = adenosine-3'-phosphate
  modified_base 4: mod_base = OTHER; note = guanosine-3'-phosphate
  modified_base 5: mod_base = OTHER; note = uridine-3'-phosphate
  modified_base 6: mod_base = OTHER; note = uridine-3'-phosphate
  modified_base 7: mod_base = OTHER; note = adenosine-3'-phosphate
  modified_base 8: mod_base = OTHER; note = uridine-3'-phosphate
  modified_base 9: mod_base = OTHER; note = cytidine-3'-phosphate
  modified_base 10: mod_base = OTHER; note = guanosine-3'-phosphate
  modified_base 11: mod_base = OTHER; note = adenosine-3'-phosphate
  modified_base 12: mod_base = OTHER; note = adenosine-3'-phosphate
  modified_base 13: mod_base = OTHER; note = adenosine-3'-phosphate
  modified_base 14: mod_base = OTHER; note = adenosine-3'-phosphate
  modified_base 15: mod_base = OTHER; note = guanosine-3'-phosphate
  modified_base 16: mod_base = OTHER; note = uridine-3'-phosphate
  modified_base 17: mod_base = OTHER; note = uridine-3'-phosphate
  modified_base 18: mod_base = OTHER; note = cytidine-3'-phosphate
  modified_base 19: mod_base = OTHER; note = adenosine-3'-phosphate
  misc_feature 1..19: note = RNA
  misc_feature 20..21: note = DNA
aaagttatcgaaaagttcatt

SEQ ID NO: 600 - DNA, 21 bp, synthetic construct
  source 1..21: mol_type = other DNA
  modified_base 1: mod_base = OTHER; note = guanosine-3'-phosphate
  modified_base 2: mod_base = OTHER; note = uridine-3'-phosphate
  modified_base 3: mod_base = OTHER; note = uridine-3'-phosphate
  modified_base 4: mod_base = OTHER; note = cytidine-3'-phosphate
  modified_base 5: mod_base = OTHER; note = cytidine-3'-phosphate
  modified_base 6: mod_base = OTHER; note = cytidine-3'-phosphate
  modified_base 7: mod_base = OTHER; note = guanosine-3'-phosphate
  modified_base 8: mod_base = OTHER; note = guanosine-3'-phosphate
  modified_base 9: mod_base = OTHER; note = cytidine-3'-phosphate
  modified_base 10: mod_base = OTHER; note = uridine-3'-phosphate
  modified_base 11: mod_base = OTHER; note = cytidine-3'-phosphate
  modified_base 12: mod_base = OTHER; note = cytidine-3'-phosphate
  modified_base 13: mod_base = OTHER; note = adenosine-3'-phosphate
  modified_base 14: mod_base = OTHER; note = guanosine-3'-phosphate
  modified_base 15: mod_base = OTHER; note = uridine-3'-phosphate
  modified_base 16: mod_base = OTHER; note = guanosine-3'-phosphate
  modified_base 17: mod_base = OTHER; note = cytidine-3'-phosphate
  modified_base 18: mod_base = OTHER; note = adenosine-3'-phosphate
  modified_base 19: mod_base = OTHER; note = adenosine-3'-phosphate
  misc_feature 1..19: note = RNA
  misc_feature 20..21: note = DNA
gttcccggctccagtgcaatt

SEQ ID NO: 601 - DNA, 21 bp, synthetic construct
  source 1..21: mol_type = other DNA
  modified_base 1: mod_base = OTHER; note = uridine-3'-phosphate
  modified_base 2: mod_base = OTHER; note = guanosine-3'-phosphate
  modified_base 3: mod_base = OTHER; note = cytidine-3'-phosphate
  modified_base 4: mod_base = OTHER; note = adenosine-3'-phosphate
  modified_base 5: mod_base = OTHER; note = cytidine-3'-phosphate
  modified_base 6: mod_base = OTHER; note = adenosine-3'-phosphate
  modified_base 7: mod_base = OTHER; note = uridine-3'-phosphate
  modified_base 8: mod_base = OTHER; note = cytidine-3'-phosphate
  modified_base 9: mod_base = OTHER; note = uridine-3'-phosphate
  modified_base 10: mod_base = OTHER; note = guanosine-3'-phosphate
  modified_base 11: mod_base = OTHER; note = uridine-3'-phosphate
  modified_base 12: mod_base = OTHER; note = guanosine-3'-phosphate
  modified_base 13: mod_base = OTHER; note = uridine-3'-phosphate
  modified_base 14: mod_base = OTHER; note = guanosine-3'-phosphate
  modified_base 15: mod_base = OTHER; note = adenosine-3'-phosphate
  modified_base 16: mod_base = OTHER; note = guanosine-3'-phosphate
  modified_base 17: mod_base = OTHER; note = cytidine-3'-phosphate
  modified_base 18: mod_base = OTHER; note = uridine-3'-phosphate
  modified_base 19: mod_base = OTHER; note = adenosine-3'-phosphate
  misc_feature 1..19: note = RNA
  misc_feature 20..21: note = DNA
tgcacatctgtgtgagctatt

SEQ ID NO: 602 - DNA, 21 bp, synthetic construct
  source 1..21: mol_type = other DNA
  modified_base 1: mod_base = OTHER; note = adenosine-3'-phosphate
  modified_base 2: mod_base = OTHER; note = guanosine-3'-phosphate
  modified_base 3: mod_base = OTHER; note = cytidine-3'-phosphate
  modified_base 4: mod_base = OTHER; note = uridine-3'-phosphate
  modified_base 5: mod_base = OTHER; note = guanosine-3'-phosphate
  modified_base 6: mod_base = OTHER; note = guanosine-3'-phosphate
  modified_base 7: mod_base = OTHER; note = guanosine-3'-phosphate
  modified_base 8: mod_base = OTHER; note = adenosine-3'-phosphate
  modified_base 9: mod_base = OTHER; note = guanosine-3'-phosphate
  modified_base 10: mod_base = OTHER; note = uridine-3'-phosphate
  modified_base 11: mod_base = OTHER; note = cytidine-3'-phosphate
  modified_base 12: mod_base = OTHER; note = cytidine-3'-phosphate
  modified_base 13: mod_base = OTHER; note = uridine-3'-phosphate
  modified_base 14: mod_base = OTHER; note = cytidine-3'-phosphate
  modified_base 15: mod_base = OTHER; note = adenosine-3'-phosphate
  modified_base 16: mod_base = OTHER; note = uridine-3'-phosphate
  modified_base 17: mod_base = OTHER; note = cytidine-3'-phosphate
  modified_base 18: mod_base = OTHER; note = adenosine-3'-phosphate
  modified_base 19: mod_base = OTHER; note = adenosine-3'-phosphate
  misc_feature 1..19: note = RNA
  misc_feature 20..21: note = DNA
agctgggagtcctcatcaatt

SEQ ID NO: 603 - DNA, 21 bp, synthetic construct
  source 1..21: mol_type = other DNA
  modified_base 1: mod_base = OTHER; note = guanosine-3'-phosphate
  modified_base 2: mod_base = OTHER; note = uridine-3'-phosphate
  modified_base 3: mod_base = OTHER; note = adenosine-3'-phosphate
  modified_base 4: mod_base = OTHER; note = uridine-3'-phosphate
  modified_base 5: mod_base = OTHER; note = uridine-3'-phosphate
  modified_base 6: mod_base = OTHER; note = guanosine-3'-phosphate
  modified_base 7: mod_base = OTHER; note = cytidine-3'-phosphate
  modified_base 8: mod_base = OTHER; note = uridine-3'-phosphate
  modified_base 9: mod_base = OTHER; note = guanosine-3'-phosphate
  modified_base 10: mod_base = OTHER; note = adenosine-3'-phosphate
  modified_base 11: mod_base = OTHER; note = adenosine-3'-phosphate
  modified_base 12: mod_base = OTHER; note = uridine-3'-phosphate
  modified_base 13: mod_base = OTHER; note = uridine-3'-phosphate
  modified_base 14: mod_base = OTHER; note = uridine-3'-phosphate
  modified_base 15: mod_base = OTHER; note = uridine-3'-phosphate
  modified_base 16: mod_base = OTHER; note = guanosine-3'-phosphate
  modified_base 17: mod_base = OTHER; note = guanosine-3'-phosphate
  modified_base 18: mod_base = OTHER; note = adenosine-3'-phosphate
  modified_base 19: mod_base = OTHER; note = uridine-3'-phosphate
  misc_feature 1..19: note = RNA
  misc_feature 20..21: note = DNA
gtattgctgaattttggattt

SEQ ID NO: 604 - DNA, 21 bp, synthetic construct
  source 1..21: mol_type = other DNA
  modified_base 1: mod_base = OTHER; note = guanosine-3'-phosphate
  modified_base 2: mod_base = OTHER; note = guanosine-3'-phosphate
  modified_base 3: mod_base = OTHER; note = adenosine-3'-phosphate
  modified_base 4: mod_base = OTHER; note = uridine-3'-phosphate
  modified_base 5: mod_base = OTHER; note = cytidine-3'-phosphate
  modified_base 6: mod_base = OTHER; note = adenosine-3'-phosphate
  modified_base 7: mod_base = OTHER; note = adenosine-3'-phosphate
  modified_base 8: mod_base = OTHER; note = uridine-3'-phosphate
  modified_base 9: mod_base = OTHER; note = guanosine-3'-phosphate
  modified_base 10: mod_base = OTHER; note = guanosine-3'-phosphate
  modified_base 11: mod_base = OTHER; note = guanosine-3'-phosphate
  modified_base 12: mod_base = OTHER; note = adenosine-3'-phosphate
  modified_base 13: mod_base = OTHER; note = cytidine-3'-phosphate
  modified_base 14: mod_base = OTHER; note = adenosine-3'-phosphate
  modified_base 15: mod_base = OTHER; note = cytidine-3'-phosphate
  modified_base 16: mod_base = OTHER; note = cytidine-3'-phosphate
  modified_base 17: mod_base = OTHER; note = uridine-3'-phosphate
  modified_base 18: mod_base = OTHER; note = uridine-3'-phosphate
  modified_base 19: mod_base = OTHER; note = uridine-3'-phosphate
  misc_feature 1..19: note = RNA
  misc_feature 20..21: note = DNA
ggatcaatgggacaccttttt

SEQ ID NO: 605 - DNA, 21 bp, synthetic construct
  source 1..21: mol_type = other DNA
  modified_base 1: mod_base = OTHER; note = cytidine-3'-phosphate
  modified_base 2: mod_base = OTHER; note = uridine-3'-phosphate
  modified_base 3: mod_base = OTHER; note = uridine-3'-phosphate
  modified_base 4: mod_base = OTHER; note = uridine-3'-phosphate
  modified_base 5: mod_base = OTHER; note = guanosine-3'-phosphate
  modified_base 6: mod_base = OTHER; note = guanosine-3'-phosphate
  modified_base 7: mod_base = OTHER; note = uridine-3'-phosphate
  modified_base 8: mod_base = OTHER; note = guanosine-3'-phosphate
  modified_base 9: mod_base = OTHER; note = adenosine-3'-phosphate
  modified_base 10: mod_base = OTHER; note = adenosine-3'-phosphate
  modified_base 11: mod_base = OTHER; note = adenosine-3'-phosphate
  modified_base 12: mod_base = OTHER; note = adenosine-3'-phosphate
  modified_base 13: mod_base = OTHER; note = adenosine-3'-phosphate
  modified_base 14: mod_base = OTHER; note = guanosine-3'-phosphate
  modified_base 15: mod_base = OTHER; note = guanosine-3'-phosphate
  modified_base 16: mod_base = OTHER; note = guanosine-3'-phosphate
  modified_base 17: mod_base = OTHER; note = uridine-3'-phosphate
  modified_base 18: mod_base = OTHER; note = cytidine-3'-phosphate
  modified_base 19: mod_base = OTHER; note = uridine-3'-phosphate
  misc_feature 1..19: note = RNA
  misc_feature 20..21: note = DNA
ctttggtgaaaaagggtcttt

SEQ ID NO: 606 - DNA, 21 bp, synthetic construct
  source 1..21: mol_type = other DNA
  modified_base 1: mod_base = OTHER; note = guanosine-3'-phosphate
  modified_base 2: mod_base = OTHER; note = guanosine-3'-phosphate
  modified_base 3: mod_base = OTHER; note = uridine-3'-phosphate
  modified_base 4: mod_base = OTHER; note = cytidine-3'-phosphate
  modified_base 5: mod_base = OTHER; note = uridine-3'-phosphate
  modified_base 6: mod_base = OTHER; note = guanosine-3'-phosphate
  modified_base 7: mod_base = OTHER; note = cytidine-3'-phosphate
  modified_base 8: mod_base = OTHER; note = guanosine-3'-phosphate
  modified_base 9: mod_base = OTHER; note = adenosine-3'-phosphate
  modified_base 10: mod_base = OTHER; note = cytidine-3'-phosphate
  modified_base 11: mod_base = OTHER; note = adenosine-3'-phosphate
  modified_base 12: mod_base = OTHER; note = guanosine-3'-phosphate
  modified_base 13: mod_base = OTHER; note = guanosine-3'-phosphate
  modified_base 14: mod_base = OTHER; note = guanosine-3'-phosphate
  modified_base 15: mod_base = OTHER; note = uridine-3'-phosphate
  modified_base 16: mod_base = OTHER; note = uridine-3'-phosphate
  modified_base 17: mod_base = OTHER; note = adenosine-3'-phosphate
  modified_base 18: mod_base = OTHER; note = cytidine-3'-phosphate
  modified_base 19: mod_base = OTHER; note = uridine-3'-phosphate
  misc_feature 1..19: note = RNA
  misc_feature 20..21: note = DNA
ggtctgcgacagggttacttt

SEQ ID NO: 607 - DNA, 21 bp, synthetic construct
  source 1..21: mol_type = other DNA
  modified_base 1: mod_base = OTHER; note = uridine-3'-phosphate
  modified_base 2: mod_base = OTHER; note = uridine-3'-phosphate
  modified_base 3: mod_base = OTHER; note = uridine-3'-phosphate
  modified_base 4: mod_base = OTHER; note = guanosine-3'-phosphate
  modified_base 5: mod_base = OTHER; note = uridine-3'-phosphate
  modified_base 6: mod_base = OTHER; note = adenosine-3'-phosphate
  modified_base 7: mod_base = OTHER; note = guanosine-3'-phosphate
  modified_base 8: mod_base = OTHER; note = adenosine-3'-phosphate
  modified_base 9: mod_base = OTHER; note = adenosine-3'-phosphate
  modified_base 10: mod_base = OTHER; note = guanosine-3'-phosphate
  modified_base 11: mod_base = OTHER; note = cytidine-3'-phosphate
  modified_base 12: mod_base = OTHER; note = uridine-3'-phosphate
  modified_base 13: mod_base = OTHER; note = cytidine-3'-phosphate
  modified_base 14: mod_base = OTHER; note = adenosine-3'-phosphate
  modified_base 15: mod_base = OTHER; note = guanosine-3'-phosphate
  modified_base 16: mod_base = OTHER; note = cytidine-3'-phosphate
  modified_base 17: mod_base = OTHER; note = cytidine-3'-phosphate
  modified_base 18: mod_base = OTHER; note = cytidine-3'-phosphate
  modified_base 19: mod_base = OTHER; note = adenosine-3'-phosphate
  misc_feature 1..19: note = RNA
  misc_feature 20..21: note = DNA
tttgtagaagctcagcccatt

SEQ ID NO: 608 - DNA, 21 bp, synthetic construct
  source 1..21: mol_type = other DNA
  modified_base 1: mod_base = OTHER; note = guanosine-3'-phosphate
  modified_base 2: mod_base = OTHER; note = cytidine-3'-phosphate
  modified_base 3: mod_base = OTHER; note = cytidine-3'-phosphate
  modified_base 4: mod_base = OTHER; note = cytidine-3'-phosphate
  modified_base 5: mod_base = OTHER; note = adenosine-3'-phosphate
  modified_base 6: mod_base = OTHER; note = adenosine-3'-phosphate
  modified_base 7: mod_base = OTHER; note = guanosine-3'-phosphate
  modified_base 8: mod_base = OTHER; note = adenosine-3'-phosphate
  modified_base 9: mod_base = OTHER; note = uridine-3'-phosphate
  modified_base 10: mod_base = OTHER; note = uridine-3'-phosphate
  modified_base 11: mod_base = OTHER; note = guanosine-3'-phosphate
  modified_base 12: mod_base = OTHER; note = uridine-3'-phosphate
  modified_base 13: mod_base = OTHER; note = cytidine-3'-phosphate
  modified_base 14: mod_base = OTHER; note = cytidine-3'-phosphate
  modified_base 15: mod_base = OTHER; note = uridine-3'-phosphate
  modified_base 16: mod_base = OTHER; note = guanosine-3'-phosphate
  modified_base 17: mod_base = OTHER; note = guanosine-3'-phosphate
  modified_base 18: mod_base = OTHER; note = guanosine-3'-phosphate
  modified_base 19: mod_base = OTHER; note = adenosine-3'-phosphate
  misc_feature 1..19: note = RNA
  misc_feature 20..21: note = DNA
gcccaagattgtcctgggatt

SEQ ID NO: 609 - DNA, 21 bp, synthetic construct
  source 1..21: mol_type = other DNA
  modified_base 1: mod_base = OTHER; note = uridine-3'-phosphate
  modified_base 2: mod_base = OTHER; note = guanosine-3'-phosphate
  modified_base 3: mod_base = OTHER; note = guanosine-3'-phosphate
  modified_base 4: mod_base = OTHER; note = guanosine-3'-phosphate
  modified_base 5: mod_base = OTHER; note = guanosine-3'-phosphate
  modified_base 6: mod_base = OTHER; note = cytidine-3'-phosphate
  modified_base 7: mod_base = OTHER; note = adenosine-3'-phosphate
  modified_base 8: mod_base = OTHER; note = guanosine-3'-phosphate
  modified_base 9: mod_base = OTHER; note = guanosine-3'-phosphate
  modified_base 10: mod_base = OTHER; note = adenosine-3'-phosphate
  modified_base 11: mod_base = OTHER; note = adenosine-3'-phosphate
  modified_base 12: mod_base = OTHER; note = cytidine-3'-phosphate
  modified_base 13: mod_base = OTHER; note = adenosine-3'-phosphate
  modified_base 14: mod_base = OTHER; note = guanosine-3'-phosphate
  modified_base 15: mod_base = OTHER; note = guanosine-3'-phosphate
  modified_base 16: mod_base = OTHER; note = adenosine-3'-phosphate
  modified_base 17: mod_base = OTHER; note = uridine-3'-phosphate
  modified_base 18: mod_base = OTHER; note = uridine-3'-phosphate
  modified_base 19: mod_base = OTHER; note = adenosine-3'-phosphate
  misc_feature 1..19: note = RNA
  misc_feature 20..21: note = DNA
tggggcaggaacaggattatt

SEQ ID NO: 610 - DNA, 21 bp, synthetic construct
  source 1..21: mol_type = other DNA
  modified_base 1: mod_base = OTHER; note = uridine-3'-phosphate
  modified_base 2: mod_base = OTHER; note = cytidine-3'-phosphate
  modified_base 3: mod_base = OTHER; note = cytidine-3'-phosphate
  modified_base 4: mod_base = OTHER; note = uridine-3'-phosphate
  modified_base 5: mod_base = OTHER; note = adenosine-3'-phosphate
  modified_base 6: mod_base = OTHER; note = uridine-3'-phosphate
  modified_base 7: mod_base = OTHER; note = guanosine-3'-phosphate
  modified_base 8: mod_base = OTHER; note = guanosine-3'-phosphate
  modified_base 9: mod_base = OTHER; note = guanosine-3'-phosphate
  modified_base 10: mod_base = OTHER; note = guanosine-3'-phosphate
  modified_base 11: mod_base = OTHER; note = guanosine-3'-phosphate
  modified_base 12: mod_base = OTHER; note = cytidine-3'-phosphate
  modified_base 13: mod_base = OTHER; note = adenosine-3'-phosphate
  modified_base 14: mod_base = OTHER; note = adenosine-3'-phosphate
  modified_base 15: mod_base = OTHER; note = guanosine-3'-phosphate
  modified_base 16: mod_base = OTHER; note = uridine-3'-phosphate
  modified_base 17: mod_base = OTHER; note = uridine-3'-phosphate
  modified_base 18: mod_base = OTHER; note = uridine-3'-phosphate
  modified_base 19: mod_base = OTHER; note = adenosine-3'-phosphate
  misc_feature 1..19: note = RNA
  misc_feature 20..21: note = DNA
tcctatgggggcaagtttatt

SEQ ID NO: 611 - DNA, 21 bp, synthetic construct
  source 1..21: mol_type = other DNA
  modified_base 1: mod_base = OTHER; note = uridine-3'-phosphate
  modified_base 2: mod_base = OTHER; note = uridine-3'-phosphate
  modified_base 3: mod_base = OTHER; note = uridine-3'-phosphate
  modified_base 4: mod_base = OTHER; note = guanosine-3'-phosphate
  modified_base 5: mod_base = OTHER; note = adenosine-3'-phosphate
  modified_base 6: mod_base = OTHER; note = uridine-3'-phosphate
  modified_base 7: mod_base = OTHER; note = adenosine-3'-phosphate
  modified_base 8: mod_base = OTHER; note = guanosine-3'-phosphate
  modified_base 9: mod_base = OTHER; note = guanosine-3'-phosphate
  modified_base 10: mod_base = OTHER; note = adenosine-3'-phosphate
  modified_base 11: mod_base = OTHER; note = guanosine-3'-phosphate
  modified_base 12: mod_base = OTHER; note = cytidine-3'-phosphate
  modified_base 13: mod_base = OTHER; note = cytidine-3'-phosphate
  modified_base 14: mod_base = OTHER; note = adenosine-3'-phosphate
  modified_base 15: mod_base = OTHER; note = guanosine-3'-phosphate
  modified_base 16: mod_base = OTHER; note = uridine-3'-phosphate
  modified_base 17: mod_base = OTHER; note = cytidine-3'-phosphate
  modified_base 18: mod_base = OTHER; note = cytidine-3'-phosphate
  modified_base 19: mod_base = OTHER; note = uridine-3'-phosphate
  misc_feature 1..19: note = RNA
  misc_feature 20..21: note = DNA
tttgataggagccagtccttt

SEQ ID NO: 612 - DNA, 21 bp, synthetic construct
  source 1..21: mol_type = other DNA
  modified_base 1: mod_base = OTHER; note = guanosine-3'-phosphate
  modified_base 2: mod_base = OTHER; note = uridine-3'-phosphate
  modified_base 3: mod_base = OTHER; note = cytidine-3'-phosphate
  modified_base 4: mod_base = OTHER; note = cytidine-3'-phosphate
  modified_base 5: mod_base = OTHER; note = uridine-3'-phosphate
  modified_base 6: mod_base = OTHER; note = uridine-3'-phosphate
  modified_base 7: mod_base = OTHER; note = uridine-3'-phosphate
  modified_base 8: mod_base = OTHER; note = guanosine-3'-phosphate
  modified_base 9: mod_base = OTHER; note = uridine-3'-phosphate
  modified_base 10: mod_base = OTHER; note = guanosine-3'-phosphate
  modified_base 11: mod_base = OTHER; note = guanosine-3'-phosphate
  modified_base 12: mod_base = OTHER; note = guanosine-3'-phosphate
  modified_base 13: mod_base = OTHER; note = adenosine-3'-phosphate
  modified_base 14: mod_base = OTHER; note = guanosine-3'-phosphate
  modified_base 15: mod_base = OTHER; note = adenosine-3'-phosphate
  modified_base 16: mod_base = OTHER; note = guanosine-3'-phosphate
  modified_base 17: mod_base = OTHER; note = adenosine-3'-phosphate
  modified_base 18: mod_base = OTHER; note = uridine-3'-phosphate
  modified_base 19: mod_base = OTHER; note = uridine-3'-phosphate
  misc_feature 1..19: note = RNA
  misc_feature 20..21: note = DNA
gtcctttgtgggagagatttt

SEQ ID NO: 613 - DNA, 21 bp, synthetic construct
  source 1..21: mol_type = other DNA
  modified_base 1: mod_base = OTHER; note = adenosine-3'-phosphate
  modified_base 2: mod_base = OTHER; note = guanosine-3'-phosphate
  modified_base 3: mod_base = OTHER; note = adenosine-3'-phosphate
  modified_base 4: mod_base = OTHER; note = uridine-3'-phosphate
  modified_base 5: mod_base = OTHER; note = uridine-3'-phosphate
  modified_base 6: mod_base = OTHER; note = guanosine-3'-phosphate
  modified_base 7: mod_base = OTHER; note = guanosine-3'-phosphate
  modified_base 8: mod_base = OTHER; note = guanosine-3'-phosphate
  modified_base 9: mod_base = OTHER; note = guanosine-3'-phosphate
  modified_base 10: mod_base = OTHER; note = adenosine-3'-phosphate
  modified_base 11: mod_base = OTHER; note = uridine-3'-phosphate
  modified_base 12: mod_base = OTHER; note = uridine-3'-phosphate
  modified_base 13: mod_base = OTHER; note = uridine-3'-phosphate
  modified_base 14: mod_base = OTHER; note = guanosine-3'-phosphate
  modified_base 15: mod_base = OTHER; note = uridine-3'-phosphate
  modified_base 16: mod_base = OTHER; note = adenosine-3'-phosphate
  modified_base 17: mod_base = OTHER; note = cytidine-3'-phosphate
  modified_base 18: mod_base = OTHER; note = adenosine-3'-phosphate
  modified_base 19: mod_base = OTHER; note = uridine-3'-phosphate
  misc_feature 1..19: note = RNA
  misc_feature 20..21: note = DNA
agattggggatttgtacattt

SEQ ID NO: 614 - DNA, 21 bp, synthetic construct
  source 1..21: mol_type = other DNA
  modified_base 1: mod_base = OTHER; note = uridine-3'-phosphate
  modified_base 2: mod_base = OTHER; note = uridine-3'-phosphate
  modified_base 3: mod_base = OTHER; note = uridine-3'-phosphate
  modified_base 4: mod_base = OTHER; note = guanosine-3'-phosphate
  modified_base 5: mod_base = OTHER; note = uridine-3'-phosphate
  modified_base 6: mod_base = OTHER; note = adenosine-3'-phosphate
  modified_base 7: mod_base = OTHER; note = cytidine-3'-phosphate
  modified_base 8: mod_base = OTHER; note = adenosine-3'-phosphate
  modified_base 9: mod_base = OTHER; note = uridine-3'-phosphate
  modified_base 10: mod_base = OTHER; note = guanosine-3'-phosphate
  modified_base 11: mod_base = OTHER; note = uridine-3'-phosphate
  modified_base 12: mod_base = OTHER; note = guanosine-3'-phosphate
  modified_base 13: mod_base = OTHER; note = guanosine-3'-phosphate
  modified_base 14: mod_base = OTHER; note = guanosine-3'-phosphate
  modified_base 15: mod_base = OTHER; note = adenosine-3'-phosphate
  modified_base 16: mod_base = OTHER; note = cytidine-3'-phosphate
  modified_base 17: mod_base = OTHER; note = uridine-3'-phosphate
  modified_base 18: mod_base = OTHER; note = cytidine-3'-phosphate
  modified_base 19: mod_base = OTHER; note = uridine-3'-phosphate
  misc_feature 1..19: note = RNA
  misc_feature 20..21: note = DNA
tttgtacatgtgggactcttt

SEQ ID NO: 615 - DNA, 21 bp, synthetic construct
  source 1..21: mol_type = other DNA
  modified_base 1: mod_base = OTHER; note = adenosine-3'-phosphate
  modified_base 2: mod_base = OTHER; note = uridine-3'-phosphate
  modified_base 3: mod_base = OTHER; note = guanosine-3'-phosphate
  modified_base 4: mod_base = OTHER; note = uridine-3'-phosphate
  modified_base 5: mod_base = OTHER; note = guanosine-3'-phosphate
  modified_base 6: mod_base = OTHER; note = guanosine-3'-phosphate
  modified_base 7: mod_base = OTHER; note = guanosine-3'-phosphate
  modified_base 8: mod_base = OTHER; note = adenosine-3'-phosphate
  modified_base 9: mod_base = OTHER; note = cytidine-3'-phosphate
  modified_base 10: mod_base = OTHER; note = uridine-3'-phosphate
  modified_base 11: mod_base = OTHER; note = cytidine-3'-phosphate
  modified_base 12: mod_base = OTHER; note = uridine-3'-phosphate
  modified_base 13: mod_base = OTHER; note = guanosine-3'-phosphate
  modified_base 14: mod_base = OTHER; note = uridine-3'-phosphate
  modified_base 15: mod_base = OTHER; note = guanosine-3'-phosphate
  modified_base 16: mod_base = OTHER; note = cytidine-3'-phosphate
  modified_base 17: mod_base = OTHER; note = uridine-3'-phosphate
  modified_base 18: mod_base = OTHER; note = guanosine-3'-phosphate
  modified_base 19: mod_base = OTHER; note = adenosine-3'-phosphate
  misc_feature 1..19: note = RNA
  misc_feature 20..21: note = DNA
atgtgggactctgtgctgatt

SEQ ID NO: 616 - DNA, 21 bp, synthetic construct
  source 1..21: mol_type = other DNA
  modified_base 1: mod_base = OTHER; note = cytidine-3'-phosphate
  modified_base 2: mod_base = OTHER; note = uridine-3'-phosphate
  modified_base 3: mod_base = OTHER; note = guanosine-3'-phosphate
  modified_base 4: mod_base = OTHER; note = cytidine-3'-phosphate
  modified_base 5: mod_base = OTHER; note = cytidine-3'-phosphate
  modified_base 6: mod_base = OTHER; note = cytidine-3'-phosphate
  modified_base 7: mod_base = OTHER; note = cytidine-3'-phosphate
  modified_base 8: mod_base = OTHER; note = cytidine-3'-phosphate
  modified_base 9: mod_base = OTHER; note = adenosine-3'-phosphate
  modified_base 10: mod_base = OTHER; note = guanosine-3'-phosphate
  modified_base 11: mod_base = OTHER; note = adenosine-3'-phosphate
  modified_base 12: mod_base = OTHER; note = adenosine-3'-phosphate
  modified_base 13: mod_base = OTHER; note = adenosine-3'-phosphate
  modified_base 14: mod_base = OTHER; note = adenosine-3'-phosphate
  modified_base 15: mod_base = OTHER; note = uridine-3'-phosphate
  modified_base 16: mod_base = OTHER; note = adenosine-3'-phosphate
  modified_base 17: mod_base = OTHER; note = uridine-3'-phosphate
  modified_base 18: mod_base = OTHER; note = cytidine-3'-phosphate
  modified_base 19: mod_base = OTHER; note = adenosine-3'-phosphate
  misc_feature 1..19: note = RNA
  misc_feature 20..21: note = DNA
ctgcccccagaaaatatcatt

SEQ ID NO: 617 - DNA, 21 bp, synthetic construct
  source 1..21: mol_type = other DNA
  modified_base 1: mod_base = OTHER; note = uridine-3'-phosphate
  modified_base 2: mod_base = OTHER; note = adenosine-3'-phosphate
  modified_base 3: mod_base = OTHER; note = uridine-3'-phosphate
  modified_base 4: mod_base = OTHER; note = cytidine-3'-phosphate
  modified_base 5: mod_base = OTHER; note = cytidine-3'-phosphate
  modified_base 6: mod_base = OTHER; note = uridine-3'-phosphate
  modified_base 7: mod_base = OTHER; note = guanosine-3'-phosphate
  modified_base 8: mod_base = OTHER; note = uridine-3'-phosphate
  modified_base 9: mod_base = OTHER; note = cytidine-3'-phosphate
  modified_base 10: mod_base = OTHER; note = uridine-3'-phosphate
  modified_base 11: mod_base = OTHER; note = guanosine-3'-phosphate
  modified_base 12: mod_base = OTHER; note = cytidine-3'-phosphate
  modified_base 13: mod_base = OTHER; note = cytidine-3'-phosphate
  modified_base 14: mod_base = OTHER; note = uridine-3'-phosphate
  modified_base 15: mod_base = OTHER; note = adenosine-3'-phosphate
  modified_base 16: mod_base = OTHER; note = uridine-3'-phosphate
  modified_base 17: mod_base = OTHER; note = cytidine-3'-phosphate
  modified_base 18: mod_base = OTHER; note = adenosine-3'-phosphate
  modified_base 19: mod_base = OTHER; note = adenosine-3'-phosphate
  misc_feature 1..19: note = RNA
  misc_feature 20..21: note = DNA
tatcctgtctgcctatcaatt

SEQ ID NO: 618 - DNA, 21 bp, synthetic construct
  source 1..21: mol_type = other DNA
  modified_base 1: mod_base = OTHER; note = cytidine-3'-phosphate
  modified_base 2: mod_base = OTHER; note = cytidine-3'-phosphate
  modified_base 3: mod_base = OTHER; note = uridine-3'-phosphate
  modified_base 4: mod_base = OTHER; note = adenosine-3'-phosphate
  modified_base 5: mod_base = OTHER; note = uridine-3'-phosphate
  modified_base 6: mod_base = OTHER; note = cytidine-3'-phosphate
  modified_base 7: mod_base = OTHER; note = adenosine-3'-phosphate
  modified_base 8: mod_base = OTHER; note = guanosine-3'-phosphate
  modified_base 9: mod_base = OTHER; note = guanosine-3'-phosphate
  modified_base 10: mod_base = OTHER; note = guanosine-3'-phosphate
  modified_base 11: mod_base = OTHER; note = uridine-3'-phosphate
  modified_base 12: mod_base = OTHER; note = adenosine-3'-phosphate
  modified_base 13: mod_base = OTHER; note = cytidine-3'-phosphate
  modified_base 14: mod_base = OTHER; note = cytidine-3'-phosphate
  modified_base 15: mod_base = OTHER; note = cytidine-3'-phosphate
  modified_base 16: mod_base = OTHER; note = cytidine-3'-phosphate
  modified_base 17: mod_base = OTHER; note = uridine-3'-phosphate
  modified_base 18: mod_base = OTHER; note = cytidine-3'-phosphate
  modified_base 19: mod_base = OTHER; note = uridine-3'-phosphate
  misc_feature 1..19: note = RNA
  misc_feature 20..21: note = DNA
cctatcagggtacccctcttt

SEQ ID NO: 619 - DNA, 21 bp, synthetic construct
  source 1..21: mol_type = other DNA
  modified_base 1: mod_base = OTHER; note = cytidine-3'-phosphate
  modified_base 2: mod_base = OTHER; note = uridine-3'-phosphate
  modified_base 3: mod_base = OTHER; note = cytidine-3'-phosphate
  modified_base 4: mod_base = OTHER; note = uridine-3'-phosphate
  modified_base 5: mod_base = OTHER; note = cytidine-3'-phosphate
  modified_base 6: mod_base = OTHER; note = cytidine-3'-phosphate
  modified_base 7: mod_base = OTHER; note = cytidine-3'-phosphate
  modified_base 8: mod_base = OTHER; note = uridine-3'-phosphate
  modified_base 9: mod_base = OTHER; note = guanosine-3'-phosphate
  modified_base 10: mod_base = OTHER; note = cytidine-3'-phosphate
  modified_base 11: mod_base = OTHER; note = cytidine-3'-phosphate
  modified_base 12: mod_base = OTHER; note = adenosine-3'-phosphate
  modified_base 13: mod_base = OTHER; note = adenosine-3'-phosphate
  modified_base 14: mod_base = OTHER; note = uridine-3'-phosphate
  modified_base 15: mod_base = OTHER; note = adenosine-3'-phosphate
  modified_base 16: mod_base = OTHER; note = uridine-3'-phosphate
  modified_base 17: mod_base = OTHER; note = cytidine-3'-phosphate
  modified_base 18: mod_base = OTHER; note = cytidine-3'-phosphate
  modified_base 19: mod_base = OTHER; note = uridine-3'-phosphate
  misc_feature 1..19: note = RNA
  misc_feature 20..21: note = DNA
ctctccctgccaatatccttt

SEQ ID NO: 620 - DNA, 21 bp, synthetic construct
  source 1..21: mol_type = other DNA
  modified_base 1: mod_base = OTHER; note = uridine-3'-phosphate
  modified_base 2: mod_base = OTHER; note = cytidine-3'-phosphate
  modified_base 3: mod_base = OTHER; note = cytidine-3'-phosphate
  modified_base 4: mod_base = OTHER; note = uridine-3'-phosphate
  modified_base 5: mod_base = OTHER; note = guanosine-3'-phosphate
  modified_base 6: mod_base = OTHER; note = guanosine-3'-phosphate
  modified_base 7: mod_base = OTHER; note = adenosine-3'-phosphate
  modified_base 8: mod_base = OTHER; note = cytidine-3'-phosphate
  modified_base 9: mod_base = OTHER; note = uridine-3'-phosphate
  modified_base 10: mod_base = OTHER; note = guanosine-3'-phosphate
  modified_base 11: mod_base = OTHER; note = guanosine-3'-phosphate
  modified_base 12: mod_base = OTHER; note = cytidine-3'-phosphate
  modified_base 13: mod_base = OTHER; note = adenosine-3'-phosphate
  modified_base 14: mod_base = OTHER; note = guanosine-3'-phosphate
  modified_base 15: mod_base = OTHER; note = guanosine-3'-phosphate
  modified_base 16: mod_base = OTHER; note = cytidine-3'-phosphate
  modified_base 17: mod_base = OTHER; note = uridine-3'-phosphate
  modified_base 18: mod_base = OTHER; note = cytidine-3'-phosphate
  modified_base 19: mod_base = OTHER; note = uridine-3'-phosphate
  misc_feature 1..19: note = RNA
  misc_feature 20..21: note = DNA
tcctggactggcaggctcttt

SEQ ID NO: 621 - DNA, 21 bp, synthetic construct
  source 1..21: mol_type = other DNA
  modified_base 1: mod_base = OTHER; note = uridine-3'-phosphate
  modified_base 2: mod_base = OTHER; note = guanosine-3'-phosphate
  modified_base 3: mod_base = OTHER; note = guanosine-3'-phosphate
  modified_base 4: mod_base = OTHER; note = cytidine-3'-phosphate
  modified_base 5: mod_base = OTHER; note = adenosine-3'-phosphate
  modified_base 6: mod_base = OTHER; note = guanosine-3'-phosphate
  modified_base 7: mod_base = OTHER; note = guanosine-3'-phosphate
  modified_base 8: mod_base = OTHER; note = cytidine-3'-phosphate
  modified_base 9: mod_base = OTHER; note = uridine-3'-phosphate
  modified_base 10: mod_base = OTHER; note = cytidine-3'-phosphate
  modified_base 11: mod_base = OTHER; note = uridine-3'-phosphate
  modified_base 12: mod_base = OTHER; note = guanosine-3'-phosphate
  modified_base 13: mod_base = OTHER; note = adenosine-3'-phosphate
  modified_base 14: mod_base = OTHER; note = adenosine-3'-phosphate
  modified_base 15: mod_base = OTHER; note = cytidine-3'-phosphate
  modified_base 16: mod_base = OTHER; note = uridine-3'-phosphate
  modified_base 17: mod_base = OTHER; note = adenosine-3'-phosphate
  modified_base 18: mod_base = OTHER; note = uridine-3'-phosphate
  modified_base 19: mod_base = OTHER; note = adenosine-3'-phosphate
  misc_feature 1..19: note = RNA
  misc_feature 20..21: note = DNA
tggcaggctctgaactatatt

SEQ ID NO: 622 - DNA, 21 bp, synthetic construct
  source 1..21: mol_type = other DNA
  modified_base 1: mod_base = OTHER; note = uridine-3'-phosphate
  modified_base 2: mod_base = OTHER; note = adenosine-3'-phosphate
  modified_base 3: mod_base = OTHER; note = uridine-3'-phosphate
  modified_base 4: mod_base = OTHER; note = guanosine-3'-phosphate
  modified_base 5: mod_base = OTHER; note = adenosine-3'-phosphate
  modified_base 6: mod_base = OTHER; note = adenosine-3'-phosphate
  modified_base 7: mod_base = OTHER; note = adenosine-3'-phosphate
  modified_base 8: mod_base = OTHER; note = uridine-3'-phosphate
  modified_base 9: mod_base = OTHER; note = cytidine-3'-phosphate
  modified_base 10: mod_base = OTHER; note = adenosine-3'-phosphate
  modified_base 11: mod_base = OTHER; note = guanosine-3'-phosphate
  modified_base 12: mod_base = OTHER; note = adenosine-3'-phosphate
  modified_base 13: mod_base = OTHER; note = guanosine-3'-phosphate
  modified_base 14: mod_base = OTHER; note = guanosine-3'-phosphate
  modified_base 15: mod_base = OTHER; note = adenosine-3'-phosphate
  modified_base 16: mod_base = OTHER; note = uridine-3'-phosphate
  modified_base 17: mod_base = OTHER; note = adenosine-3'-phosphate
  modified_base 18: mod_base = OTHER; note = uridine-3'-phosphate
  modified_base 19: mod_base = OTHER; note = adenosine-3'-phosphate
  misc_feature 1..19: note = RNA
  misc_feature 20..21: note = DNA
tatgaaatcagaggatatatt

SEQ ID NO: 623 - DNA, 21 bp, synthetic construct
  source 1..21: mol_type = other DNA
  modified_base 1: mod_base = OTHER; note = uridine-3'-phosphate
  modified_base 2: mod_base = OTHER; note = adenosine-3'-phosphate
  modified_base 3: mod_base = OTHER; note = uridine-3'-phosphate
  modified_base 4: mod_base = OTHER; note = guanosine-3'-phosphate
  modified_base 5: mod_base = OTHER; note = uridine-3'-phosphate
  modified_base 6: mod_base = OTHER; note = cytidine-3'-phosphate
  modified_base 7: mod_base = OTHER; note = adenosine-3'-phosphate
  modified_base 8: mod_base = OTHER; note = uridine-3'-phosphate
  modified_base 9: mod_base = OTHER; note = cytidine-3'-phosphate
  modified_base 10: mod_base = OTHER; note = adenosine-3'-phosphate
  modified_base 11: mod_base = OTHER; note = uridine-3'-phosphate
  modified_base 12: mod_base = OTHER; note = cytidine-3'-phosphate
  modified_base 13: mod_base = OTHER; note = adenosine-3'-phosphate
  modified_base 14: mod_base = OTHER; note = adenosine-3'-phosphate
  modified_base 15: mod_base = OTHER; note = adenosine-3'-phosphate
  modified_base 16: mod_base = OTHER; note = cytidine-3'-phosphate
  modified_base 17: mod_base = OTHER; note = cytidine-3'-phosphate
  modified_base 18: mod_base = OTHER; note = cytidine-3'-phosphate
  modified_base 19: mod_base = OTHER; note = uridine-3'-phosphate
  misc_feature 1..19: note = RNA
  misc_feature 20..21: note = DNA
tatgtcatcatcaaacccttt

SEQ ID NO: 624 - DNA, 21 bp, synthetic construct
  source 1..21: mol_type = other DNA
  modified_base 1: mod_base = OTHER; note = adenosine-3'-phosphate
  modified_base 2: mod_base = OTHER; note = cytidine-3'-phosphate
  modified_base 3: mod_base = OTHER; note = cytidine-3'-phosphate
  modified_base 4: mod_base = OTHER; note = cytidine-3'-phosphate
  modified_base 5: mod_base = OTHER; note = uridine-3'-phosphate
  modified_base 6: mod_base = OTHER; note = uridine-3'-phosphate
  modified_base 7: mod_base = OTHER; note = guanosine-3'-phosphate
  modified_base 8: mod_base = OTHER; note = guanosine-3'-phosphate
  modified_base 9: mod_base = OTHER; note = uridine-3'-phosphate
  modified_base 10: mod_base = OTHER; note = guanosine-3'-phosphate
  modified_base 11: mod_base = OTHER; note = uridine-3'-phosphate
  modified_base 12: mod_base = OTHER; note = guanosine-3'-phosphate
  modified_base 13: mod_base = OTHER; note = guanosine-3'-phosphate
  modified_base 14: mod_base = OTHER; note = guanosine-3'-phosphate
  modified_base 15: mod_base = OTHER; note = uridine-3'-phosphate
  modified_base 16: mod_base = OTHER; note = cytidine-3'-phosphate
  modified_base 17: mod_base = OTHER; note = uridine-3'-phosphate
  modified_base 18: mod_base = OTHER; note = guanosine-3'-phosphate
  modified_base 19: mod_base = OTHER; note = adenosine-3'-phosphate
  misc_feature 1..19: note = RNA
  misc_feature 20..21: note = DNA
acccttggtgtgggtctgatt

SEQ ID NO: 625 - DNA, 21 bp, synthetic construct
  source 1..21: mol_type = other DNA
  modified_base 1: mod_base = OTHER; note = uridine-3'-phosphate
  modified_base 2: mod_base = OTHER; note = guanosine-3'-phosphate
  modified_base 3: mod_base = OTHER; note = uridine-3'-phosphate
  modified_base 4: mod_base = OTHER; note = guanosine-3'-phosphate
  modified_base 5: mod_base = OTHER; note = guanosine-3'-phosphate
  modified_base 6: mod_base = OTHER; note = guanosine-3'-phosphate
  modified_base 7: mod_base = OTHER; note = uridine-3'-phosphate
  modified_base 8: mod_base = OTHER; note = cytidine-3'-phosphate
  modified_base 9: mod_base = OTHER; note = uridine-3'-phosphate
  modified_base 10: mod_base = OTHER; note = guanosine-3'-phosphate
  modified_base 11: mod_base = OTHER; note = adenosine-3'-phosphate
  modified_base 12: mod_base = OTHER; note = guanosine-3'-phosphate
  modified_base 13: mod_base = OTHER; note = guanosine-3'-phosphate
  modified_base 14: mod_base = OTHER; note = uridine-3'-phosphate
  modified_base 15: mod_base = OTHER; note = cytidine-3'-phosphate
  modified_base 16: mod_base = OTHER; note = uridine-3'-phosphate
  modified_base 17: mod_base = OTHER; note = uridine-3'-phosphate
  modified_base 18: mod_base = OTHER; note = guanosine-3'-phosphate
  modified_base 19: mod_base = OTHER; note = adenosine-3'-phosphate
  misc_feature 1..19: note = RNA
  misc_feature 20..21: note = DNA
tgtgggtctgaggtcttgatt

SEQ ID NO: 626 - DNA, 21 bp, synthetic construct
  source 1..21: mol_type = other DNA
  modified_base 1: mod_base = OTHER; note = uridine-3'-phosphate
  modified_base 2: mod_base = OTHER; note = uridine-3'-phosphate
  modified_base 3: mod_base = OTHER; note = guanosine-3'-phosphate
  modified_base 4: mod_base = OTHER; note = adenosine-3'-phosphate
  modified_base 5: mod_base = OTHER; note = cytidine-3'-phosphate
  modified_base 6: mod_base = OTHER; note = uridine-3'-phosphate
  modified_base 7: mod_base = OTHER; note = cytidine-3'-phosphate
  modified_base 8: mod_base = OTHER; note = adenosine-3'-phosphate
  modified_base 9: mod_base = OTHER; note = adenosine-3'-phosphate
  modified_base 10: mod_base = OTHER; note = cytidine-3'-phosphate
  modified_base 11: mod_base = OTHER; note = guanosine-3'-phosphate
  modified_base 12: mod_base = OTHER; note = adenosine-3'-phosphate
  modified_base 13: mod_base = OTHER; note = guanosine-3'-phosphate
  modified_base 14: mod_base = OTHER; note = adenosine-3'-phosphate
  modified_base 15: mod_base = OTHER; note = guanosine-3'-phosphate
  modified_base 16: mod_base = OTHER; note = cytidine-3'-phosphate
  modified_base 17: mod_base = OTHER; note = adenosine-3'-phosphate
  modified_base 18: mod_base = OTHER; note = cytidine-3'-phosphate
  modified_base 19: mod_base = OTHER; note = uridine-3'-phosphate
  misc_feature 1..19: note = RNA
  misc_feature 20..21: note = DNA
ttgactcaacgagagcacttt

SEQ ID NO: 627 - DNA, 21 bp, synthetic construct
  source 1..21: mol_type = other DNA
  modified_base 1: mod_base = OTHER; note = guanosine-3'-phosphate
  modified_base 2: mod_base = OTHER; note = cytidine-3'-phosphate
  modified_base 3: mod_base = OTHER; note = adenosine-3'-phosphate
  modified_base 4: mod_base = OTHER; note = cytidine-3'-phosphate
  modified_base 5: mod_base = OTHER; note = uridine-3'-phosphate
  modified_base 6: mod_base = OTHER; note = uridine-3'-phosphate
  modified_base 7: mod_base = OTHER; note = guanosine-3'-phosphate
  modified_base 8: mod_base = OTHER; note = adenosine-3'-phosphate
  modified_base 9: mod_base = OTHER; note = adenosine-3'-phosphate
  modified_base 10: mod_base = OTHER; note = adenosine-3'-phosphate
  modified_base 11: mod_base = OTHER; note = adenosine-3'-phosphate
  modified_base 12: mod_base = OTHER; note = uridine-3'-phosphate
  modified_base 13: mod_base = OTHER; note = guanosine-3'-phosphate
  modified_base 14: mod_base = OTHER; note = adenosine-3'-phosphate
  modified_base 15: mod_base = OTHER; note = adenosine-3'-phosphate
  modified_base 16: mod_base = OTHER; note = adenosine-3'-phosphate
  modified_base 17: mod_base = OTHER; note = uridine-3'-phosphate
  modified_base 18: mod_base = OTHER; note = guanosine-3'-phosphate
  modified_base 19: mod_base = OTHER; note = adenosine-3'-phosphate
  misc_feature 1..19: note = RNA
  misc_feature 20..21: note = DNA
gcacttgaaaatgaaatgatt

SEQ ID NO: 628 - DNA, 21 bp, synthetic construct
  source 1..21: mol_type = other DNA
  modified_base 1: mod_base = OTHER; note = adenosine-3'-phosphate
  modified_base 2: mod_base = OTHER; note = adenosine-3'-phosphate
  modified_base 3: mod_base = OTHER; note = uridine-3'-phosphate
  modified_base 4: mod_base = OTHER; note = guanosine-3'-phosphate
  modified_base 5: mod_base = OTHER; note = adenosine-3'-phosphate
  modified_base 6: mod_base = OTHER; note = cytidine-3'-phosphate
  modified_base 7: mod_base = OTHER; note = uridine-3'-phosphate
  modified_base 8: mod_base = OTHER; note = guanosine-3'-phosphate
  modified_base 9: mod_base = OTHER; note = uridine-3'-phosphate
  modified_base 10: mod_base = OTHER; note = cytidine-3'-phosphate
  modified_base 11: mod_base = OTHER; note = uridine-3'-phosphate
  modified_base 12: mod_base = OTHER; note = adenosine-3'-phosphate
  modified_base 13: mod_base = OTHER; note = adenosine-3'-phosphate
  modified_base 14: mod_base = OTHER; note = guanosine-3'-phosphate
  modified_base 15: mod_base = OTHER; note = adenosine-3'-phosphate
  modified_base 16: mod_base = OTHER; note = guanosine-3'-phosphate
  modified_base 17: mod_base = OTHER; note = adenosine-3'-phosphate
  modified_base 18: mod_base = OTHER; note = uridine-3'-phosphate
  modified_base 19: mod_base = OTHER; note = adenosine-3'-phosphate
  misc_feature 1..19: note = RNA
  misc_feature 20..21: note = DNA
aatgactgtctaagagatatt

SEQ ID NO: 629 - DNA, 21 bp, synthetic construct
  source 1..21: mol_type = other DNA
  modified_base 1: mod_base = OTHER; note = adenosine-3'-phosphate
  modified_base 2: mod_base = OTHER; note = guanosine-3'-phosphate
  modified_base 3: mod_base = OTHER; note = adenosine-3'-phosphate
  modified_base 4: mod_base = OTHER; note = uridine-3'-phosphate
  modified_base 5: mod_base = OTHER; note = cytidine-3'-phosphate
  modified_base 6: mod_base = OTHER; note = uridine-3'-phosphate
  modified_base 7: mod_base = OTHER; note = guanosine-3'-phosphate
  modified_base 8: mod_base = OTHER; note = guanosine-3'-phosphate
  modified_base 9: mod_base = OTHER; note = uridine-3'-phosphate
  modified_base 10: mod_base = OTHER; note = cytidine-3'-phosphate
  modified_base 11: mod_base = OTHER; note = adenosine-3'-phosphate
  modified_base 12: mod_base = OTHER; note = adenosine-3'-phosphate
  modified_base 13: mod_base = OTHER; note = adenosine-3'-phosphate
  modified_base 14: mod_base = OTHER; note = guanosine-3'-phosphate
  modified_base 15: mod_base = OTHER; note = cytidine-3'-phosphate
  modified_base 16: mod_base = OTHER; note = adenosine-3'-phosphate
  modified_base 17: mod_base = OTHER; note = adenosine-3'-phosphate
  modified_base 18: mod_base = OTHER; note = cytidine-3'-phosphate
  modified_base 19: mod_base = OTHER; note = uridine-3'-phosphate
  misc_feature 1..19: note = RNA
  misc_feature 20..21: note = DNA
agatctggtcaaagcaacttt

SEQ ID NO: 630 - DNA, 21 bp, synthetic construct
  source 1..21: mol_type = other DNA
  modified_base 1: mod_base = OTHER; note = cytidine-3'-phosphate
  modified_base 2: mod_base = OTHER; note = adenosine-3'-phosphate
  modified_base 3: mod_base = OTHER; note = adenosine-3'-phosphate
  modified_base 4: mod_base = OTHER; note = adenosine-3'-phosphate
  modified_base 5: mod_base = OTHER; note = guanosine-3'-phosphate
  modified_base 6: mod_base = OTHER; note = cytidine-3'-phosphate
  modified_base 7: mod_base = OTHER; note = adenosine-3'-phosphate
  modified_base 8: mod_base = OTHER; note = adenosine-3'-phosphate
  modified_base 9: mod_base = OTHER; note = cytidine-3'-phosphate
  modified_base 10: mod_base = OTHER; note = uridine-3'-phosphate
  modified_base 11: mod_base = OTHER; note = guanosine-3'-phosphate
  modified_base 12: mod_base = OTHER; note = guanosine-3'-phosphate
  modified_base 13: mod_base = OTHER; note = adenosine-3'-phosphate
  modified_base 14: mod_base = OTHER; note = uridine-3'-phosphate
  modified_base 15: mod_base = OTHER; note = adenosine-3'-phosphate
  modified_base 16: mod_base = OTHER; note = cytidine-3'-phosphate
  modified_base 17: mod_base = OTHER; note = uridine-3'-phosphate
  modified_base 18: mod_base = OTHER; note = adenosine-3'-phosphate
  modified_base 19: mod_base = OTHER; note = adenosine-3'-phosphate
  misc_feature 1..19: note = RNA
  misc_feature 20..21: note = DNA
caaagcaactggatactaatt

SEQ ID NO: 631 - DNA, 21 bp, synthetic construct
  source 1..21: mol_type = other DNA
  modified_base 1: mod_base = OTHER; note = cytidine-3'-phosphate
  modified_base 2: mod_base = OTHER; note = uridine-3'-phosphate
  modified_base 3: mod_base = OTHER; note = adenosine-3'-phosphate
  modified_base 4: mod_base = OTHER; note = guanosine-3'-phosphate
  modified_base 5: mod_base = OTHER; note = adenosine-3'-phosphate
  modified_base 6: mod_base = OTHER; note = uridine-3'-phosphate
  modified_base 7: mod_base = OTHER; note = cytidine-3'-phosphate
  modified_base 8: mod_base = OTHER; note = uridine-3'-phosphate
  modified_base 9: mod_base = OTHER; note = uridine-3'-phosphate
  modified_base 10: mod_base = OTHER; note = adenosine-3'-phosphate
  modified_base 11: mod_base = OTHER; note = cytidine-3'-phosphate
  modified_base 12: mod_base = OTHER; note = adenosine-3'-phosphate
  modified_base 13: mod_base = OTHER; note = uridine-3'-phosphate
  modified_base 14: mod_base = OTHER; note = cytidine-3'-phosphate
  modified_base 15: mod_base = OTHER; note = uridine-3'-phosphate
  modified_base 16: mod_base = OTHER; note = guanosine-3'-phosphate
  modified_base 17: mod_base = OTHER; note = cytidine-3'-phosphate
  modified_base 18: mod_base = OTHER; note = adenosine-3'-phosphate
  modified_base 19: mod_base = OTHER; note = adenosine-3'-phosphate
  misc_feature 1..19: note = RNA
  misc_feature 20..21: note = DNA
ctagatcttacatctgcaatt

SEQ ID NO: 632 - DNA, 21 bp, synthetic construct
  source 1..21: mol_type = other DNA
  modified_base 1: mod_base = OTHER; note = guanosine-3'-phosphate
  modified_base 2: mod_base = OTHER; note = cytidine-3'-phosphate
  modified_base 3: mod_base = OTHER; note = adenosine-3'-phosphate
  modified_base 4: mod_base = OTHER; note = guanosine-3'-phosphate
  modified_base 5: mod_base = OTHER; note = cytidine-3'-phosphate
  modified_base 6: mod_base = OTHER; note = uridine-3'-phosphate
  modified_base 7: mod_base = OTHER; note = cytidine-3'-phosphate
  modified_base 8: mod_base = OTHER; note = uridine-3'-phosphate
  modified_base 9: mod_base = OTHER; note = uridine-3'-phosphate
  modified_base 10: mod_base = OTHER; note = uridine-3'-phosphate
  modified_base 11: mod_base = OTHER; note = cytidine-3'-phosphate
  modified_base 12: mod_base = OTHER; note = uridine-3'-phosphate
  modified_base 13: mod_base = OTHER; note = uridine-3'-phosphate
  modified_base 14: mod_base = OTHER; note = cytidine-3'-phosphate
  modified_base 15: mod_base = OTHER; note = uridine-3'-phosphate
  modified_base 16: mod_base = OTHER; note = uridine-3'-phosphate
  modified_base 17: mod_base = OTHER; note = uridine-3'-phosphate
  modified_base 18: mod_base = OTHER; note = guanosine-3'-phosphate
  modified_base 19: mod_base = OTHER; note = adenosine-3'-phosphate
  misc_feature 1..19: note = RNA
  misc_feature 20..21: note = DNA
gcagctctttcttctttgatt

SEQ ID NO: 633 - DNA, 21 bp, synthetic construct
  source 1..21: mol_type = other DNA
  modified_base 1: mod_base = OTHER; note = uridine-3'-phosphate
  modified_base 2: mod_base = OTHER; note = uridine-3'-phosphate
  modified_base 3: mod_base = OTHER; note = guanosine-3'-phosphate
  modified_base 4: mod_base = OTHER; note = adenosine-3'-phosphate
  modified_base 5: mod_base = OTHER; note = adenosine-3'-phosphate
  modified_base 6: mod_base = OTHER; note = uridine-3'-phosphate
  modified_base 7: mod_base = OTHER; note = uridine-3'-phosphate
  modified_base 8: mod_base = OTHER; note = uridine-3'-phosphate
  modified_base 9: mod_base = OTHER; note = cytidine-3'-phosphate
  modified_base 10: mod_base = OTHER; note = cytidine-3'-phosphate
  modified_base 11: mod_base = OTHER; note = uridine-3'-phosphate
  modified_base 12: mod_base = OTHER; note = adenosine-3'-phosphate
  modified_base 13: mod_base = OTHER; note = uridine-3'-phosphate
  modified_base 14: mod_base = OTHER; note = cytidine-3'-phosphate
  modified_base 15: mod_base = OTHER; note = uridine-3'-phosphate
  modified_base 16: mod_base = OTHER; note = guanosine-3'-phosphate
  modified_base 17: mod_base = OTHER; note = uridine-3'-phosphate
  modified_base 18: mod_base = OTHER; note = adenosine-3'-phosphate
  modified_base 19: mod_base = OTHER; note = uridine-3'-phosphate
  misc_feature 1..19: note = RNA
  misc_feature 20..21: note = DNA
ttgaatttcctatctgtattt

SEQ ID NO: 634 - DNA, 21 bp, synthetic construct
  source 1..21: mol_type = other DNA
  modified_base 1: mod_base = OTHER; note = cytidine-3'-phosphate
  modified_base 2: mod_base = OTHER; note = uridine-3'-phosphate
  modified_base 3: mod_base = OTHER; note = adenosine-3'-phosphate
  modified_base 4: mod_base = OTHER; note = uridine-3'-phosphate
  modified_base 5: mod_base = OTHER; note = cytidine-3'-phosphate
  modified_base 6: mod_base = OTHER; note = uridine-3'-phosphate
  modified_base 7: mod_base = OTHER; note = guanosine-3'-phosphate
  modified_base 8: mod_base = OTHER; note = uridine-3'-phosphate
  modified_base 9: mod_base = OTHER; note = adenosine-3'-phosphate
  modified_base 10: mod_base = OTHER; note = uridine-3'-phosphate
  modified_base 11: mod_base = OTHER; note = guanosine-3'-phosphate
  modified_base 12: mod_base = OTHER; note = uridine-3'-phosphate
  modified_base 13: mod_base = OTHER; note = cytidine-3'-phosphate
  modified_base 14: mod_base = OTHER; note = uridine-3'-phosphate
  modified_base 15: mod_base = OTHER; note = guanosine-3'-phosphate
  modified_base 16: mod_base = OTHER; note = cytidine-3'-phosphate
  modified_base 17: mod_base = OTHER; note = cytidine-3'-phosphate
  modified_base 18: mod_base = OTHER; note = uridine-3'-phosphate
  modified_base 19: mod_base = OTHER; note = adenosine-3'-phosphate
  misc_feature 1..19: note = RNA
  misc_feature 20..21: note = DNA
ctatctgtatgtctgcctatt

SEQ ID NO: 635 - DNA, 21 bp, synthetic construct
  source 1..21: mol_type = other DNA
  modified_base 1: mod_base = OTHER; note = cytidine-3'-phosphate
  modified_base 2: mod_base = OTHER; note = cytidine-3'-phosphate
  modified_base 3: mod_base = OTHER; note = uridine-3'-phosphate
  modified_base 4: mod_base = OTHER; note = adenosine-3'-phosphate
  modified_base 5: mod_base = OTHER; note = adenosine-3'-phosphate
  modified_base 6: mod_base = OTHER; note = uridine-3'-phosphate
  modified_base 7: mod_base = OTHER; note = uridine-3'-phosphate
  modified_base 8: mod_base = OTHER; note = adenosine-3'-phosphate
  modified_base 9: mod_base = OTHER; note = adenosine-3'-phosphate
  modified_base 10: mod_base = OTHER; note = adenosine-3'-phosphate
  modified_base 11: mod_base = OTHER; note = adenosine-3'-phosphate
  modified_base 12: mod_base = OTHER; note = adenosine-3'-phosphate
  modified_base 13: mod_base = OTHER; note = adenosine-3'-phosphate
  modified_base 14: mod_base = OTHER; note = adenosine-3'-phosphate
  modified_base 15: mod_base = OTHER; note = uridine-3'-phosphate
  modified_base 16: mod_base = OTHER; note = adenosine-3'-phosphate
  modified_base 17: mod_base = OTHER; note = uridine-3'-phosphate
  modified_base 18: mod_base = OTHER; note = adenosine-3'-phosphate
  modified_base 19: mod_base = OTHER; note = uridine-3'-phosphate
  misc_feature 1..19: note = RNA
  misc_feature 20..21: note = DNA
cctaattaaaaaaatatattt

SEQ ID NO: 636 - DNA, 21 bp, synthetic construct
  source 1..21: mol_type = other DNA
  modified_base 1: mod_base = OTHER; note = uridine-3'-phosphate
  modified_base 2: mod_base = OTHER; note = adenosine-3'-phosphate
  modified_base 3: mod_base = OTHER; note = uridine-3'-phosphate
  modified_base 4: mod_base = OTHER; note = adenosine-3'-phosphate
  modified_base 5: mod_base = OTHER; note = uridine-3'-phosphate
  modified_base 6: mod_base = OTHER; note = adenosine-3'-phosphate
  modified_base 7: mod_base = OTHER; note = uridine-3'-phosphate
  modified_base 8: mod_base = OTHER; note = uridine-3'-phosphate
  modified_base 9: mod_base = OTHER; note = guanosine-3'-phosphate
  modified_base 10: mod_base = OTHER; note = uridine-3'-phosphate
  modified_base 11: mod_base = OTHER; note = adenosine-3'-phosphate
  modified_base 12: mod_base = OTHER; note = uridine-3'-phosphate
  modified_base 13: mod_base = OTHER; note = uridine-3'-phosphate
  modified_base 14: mod_base = OTHER; note = adenosine-3'-phosphate
  modified_base 15: mod_base = OTHER; note = uridine-3'-phosphate
  modified_base 16: mod_base = OTHER; note = guanosine-3'-phosphate
  modified_base 17: mod_base = OTHER; note = cytidine-3'-phosphate
  modified_base 18: mod_base = OTHER; note = uridine-3'-phosphate
  modified_base 19: mod_base = OTHER; note = adenosine-3'-phosphate
  misc_feature 1..19: note = RNA
  misc_feature 20..21: note = DNA
tatatattgtattatgctatt

SEQ ID NO: 637 - DNA, 21 bp, synthetic construct
  source 1..21: mol_type = other DNA
  modified_base 1: mod_base = OTHER; note = uridine-3'-phosphate
  modified_base 2: mod_base = OTHER; note = cytidine-3'-phosphate
  modified_base 3: mod_base = OTHER; note = cytidine-3'-phosphate
  modified_base 4: mod_base = OTHER; note = cytidine-3'-phosphate
  modified_base 5: mod_base = OTHER; note = cytidine-3'-phosphate
  modified_base 6: mod_base = OTHER; note = uridine-3'-phosphate
  modified_base 7: mod_base = OTHER; note = adenosine-3'-phosphate
  modified_base 8: mod_base = OTHER; note = guanosine-3'-phosphate
  modified_base 9: mod_base = OTHER; note = cytidine-3'-phosphate
  modified_base 10: mod_base = OTHER; note = guanosine-3'-phosphate
  modified_base 11: mod_base = OTHER; note = uridine-3'-phosphate
  modified_base 12: mod_base = OTHER; note = cytidine-3'-phosphate
  modified_base 13: mod_base = OTHER; note = uridine-3'-phosphate
  modified_base 14: mod_base = OTHER; note = guanosine-3'-phosphate
  modified_base 15: mod_base = OTHER; note = adenosine-3'-phosphate
  modified_base 16: mod_base = OTHER; note = uridine-3'-phosphate
  modified_base 17: mod_base = OTHER; note = adenosine-3'-phosphate
  modified_base 18: mod_base = OTHER; note = uridine-3'-phosphate
  modified_base 19: mod_base = OTHER; note = uridine-3'-phosphate
  misc_feature 1..19: note = RNA
  misc_feature 20..21: note = DNA
tcccctagcgtctgatatttt

SEQ ID NO: 638 - DNA, 21 bp, synthetic construct
  source 1..21: mol_type = other DNA
  modified_base 1: mod_base = OTHER; note = adenosine-3'-phosphate
  modified_base 2: mod_base = OTHER; note = adenosine-3'-phosphate
  modified_base 3: mod_base = OTHER; note = cytidine-3'-phosphate
  modified_base 4: mod_base = OTHER; note = adenosine-3'-phosphate
  modified_base 5: mod_base = OTHER; note = cytidine-3'-phosphate
  modified_base 6: mod_base = OTHER; note = adenosine-3'-phosphate
  modified_base 7: mod_base = OTHER; note = guanosine-3'-phosphate
  modified_base 8: mod_base = OTHER; note = uridine-3'-phosphate
  modified_base 9: mod_base = OTHER; note = guanosine-3'-phosphate
  modified_base 10: mod_base = OTHER; note = guanosine-3'-phosphate
  modified_base 11: mod_base = OTHER; note = cytidine-3'-phosphate
  modified_base 12: mod_base = OTHER; note = uridine-3'-phosphate
  modified_base 13: mod_base = OTHER; note = guanosine-3'-phosphate
  modified_base 14: mod_base = OTHER; note = uridine-3'-phosphate
  modified_base 15: mod_base = OTHER; note = cytidine-3'-phosphate
  modified_base 16: mod_base = OTHER; note = cytidine-3'-phosphate
  modified_base 17: mod_base = OTHER; note = cytidine-3'-phosphate
  modified_base 18: mod_base = OTHER; note = cytidine-3'-phosphate
  modified_base 19: mod_base = OTHER; note = cytidine-3'-phosphate
  misc_feature 1..19: note = RNA
  misc_feature 20..21: note = DNA
aacacagtggctgtccccctt

SEQ ID NO: 639 - DNA, 21 bp, synthetic construct
  source 1..21: mol_type = other DNA
  modified_base 1: mod_base = OTHER; note = uridine-3'-phosphate
  modified_base 2: mod_base = OTHER; note = guanosine-3'-phosphate
  modified_base 3: mod_base = OTHER; note = adenosine-3'-phosphate
  modified_base 4: mod_base = OTHER; note = uridine-3'-phosphate
  modified_base 5: mod_base = OTHER; note = guanosine-3'-phosphate
  modified_base 6: mod_base = OTHER; note = adenosine-3'-phosphate
  modified_base 7: mod_base = OTHER; note = guanosine-3'-phosphate
  modified_base 8: mod_base = OTHER; note = guanosine-3'-phosphate
  modified_base 9: mod_base = OTHER; note = guanosine-3'-phosphate
  modified_base 10: mod_base = OTHER; note = uridine-3'-phosphate
  modified_base 11: mod_base = OTHER; note = adenosine-3'-phosphate
  modified_base 12: mod_base = OTHER; note = guanosine-3'-phosphate
  modified_base 13: mod_base = OTHER; note = cytidine-3'-phosphate
  modified_base 14: mod_base = OTHER; note = adenosine-3'-phosphate
  modified_base 15: mod_base = OTHER; note = guanosine-3'-phosphate
  modified_base 16: mod_base = OTHER; note = adenosine-3'-phosphate
  modified_base 17: mod_base = OTHER; note = cytidine-3'-phosphate
  modified_base 18: mod_base = OTHER; note = adenosine-3'-phosphate
  modified_base 19: mod_base = OTHER; note = adenosine-3'-phosphate
  misc_feature 1..19: note = RNA
  misc_feature 20..21: note = DNA
tgatgagggtagcagacaatt

SEQ ID NO: 640 - DNA, 21 bp, synthetic construct
  source 1..21: mol_type = other DNA
  modified_base 1: mod_base = OTHER; note = adenosine-3'-phosphate
  modified_base 2: mod_base = OTHER; note = guanosine-3'-phosphate
  modified_base 3: mod_base = OTHER; note = adenosine-3'-phosphate
  modified_base 4: mod_base = OTHER; note = adenosine-3'-phosphate
  modified_base 5: mod_base = OTHER; note = guanosine-3'-phosphate
  modified_base 6: mod_base = OTHER; note = cytidine-3'-phosphate
  modified_base 7: mod_base = OTHER; note = adenosine-3'-phosphate
  modified_base 8: mod_base = OTHER; note = guanosine-3'-phosphate
  modified_base 9: mod_base = OTHER; note = uridine-3'-phosphate
  modified_base 10: mod_base = OTHER; note = guanosine-3'-phosphate
  modified_base 11: mod_base = OTHER; note = adenosine-3'-phosphate
  modified_base 12: mod_base = OTHER; note = cytidine-3'-phosphate
  modified_base 13: mod_base = OTHER; note = cytidine-3'-phosphate
  modified_base 14: mod_base = OTHER; note = adenosine-3'-phosphate
  modified_base 15: mod_base = OTHER; note = guanosine-3'-phosphate
  modified_base 16: mod_base = OTHER; note = guanosine-3'-phosphate
  modified_base 17: mod_base = OTHER; note = adenosine-3'-phosphate
  modified_base 18: mod_base = OTHER; note = uridine-3'-phosphate
  modified_base 19: mod_base = OTHER; note = guanosine-3'-phosphate
  misc_feature 1..19: note = RNA
  misc_feature 20..21: note = DNA
agaagcagtgaccaggatgtt

SEQ ID NO: 641 - DNA, 21 bp, synthetic construct
  source 1..21: mol_type = other DNA
  modified_base 1: mod_base = OTHER; note = uridine-3'-phosphate
  modified_base 2: mod_base = OTHER; note = adenosine-3'-phosphate
  modified_base 3: mod_base = OTHER; note = guanosine-3'-phosphate
  modified_base 4: mod_base = OTHER; note = guanosine-3'-phosphate
  modified_base 5: mod_base = OTHER; note = guanosine-3'-phosphate
  modified_base 6: mod_base = OTHER; note = cytidine-3'-phosphate
  modified_base 7: mod_base = OTHER; note = uridine-3'-phosphate
  modified_base 8: mod_base = OTHER; note = guanosine-3'-phosphate
  modified_base 9: mod_base = OTHER; note = uridine-3'-phosphate
  modified_base 10: mod_base = OTHER; note = uridine-3'-phosphate
  modified_base 11: mod_base = OTHER; note = adenosine-3'-phosphate
  modified_base 12: mod_base = OTHER; note = uridine-3'-phosphate
  modified_base 13: mod_base = OTHER; note = adenosine-3'-phosphate
  modified_base 14: mod_base = OTHER; note = guanosine-3'-phosphate
  modified_base 15: mod_base = OTHER; note = cytidine-3'-phosphate
  modified_base 16: mod_base = OTHER; note = adenosine-3'-phosphate
  modified_base 17: mod_base = OTHER; note = guanosine-3'-phosphate
  modified_base 18: mod_base = OTHER; note = adenosine-3'-phosphate
  modified_base 19: mod_base = OTHER; note = adenosine-3'-phosphate
  misc_feature 1..19: note = RNA
  misc_feature 20..21: note = DNA
tagggctgttatagcagaatt

SEQ ID NO: 642 - DNA, 21 bp, synthetic construct
  source 1..21: mol_type = other DNA
  modified_base 1: mod_base = OTHER; note = uridine-3'-phosphate
  modified_base 2: mod_base = OTHER; note = cytidine-3'-phosphate
  modified_base 3: mod_base = OTHER; note = adenosine-3'-phosphate
  modified_base 4: mod_base = OTHER; note = uridine-3'-phosphate
  modified_base 5: mod_base = OTHER; note = adenosine-3'-phosphate
  modified_base 6: mod_base = OTHER; note = uridine-3'-phosphate
  modified_base 7: mod_base = OTHER; note = uridine-3'-phosphate
  modified_base 8: mod_base = OTHER; note = cytidine-3'-phosphate
  modified_base 9: mod_base = OTHER; note = cytidine-3'-phosphate
  modified_base 10: mod_base = OTHER; note = uridine-3'-phosphate
  modified_base 11: mod_base = OTHER; note = guanosine-3'-phosphate
  modified_base 12: mod_base = OTHER; note = guanosine-3'-phosphate
  modified_base 13: mod_base = OTHER; note = cytidine-3'-phosphate
  modified_base 14: mod_base = OTHER; note = cytidine-3'-phosphate
  modified_base 15: mod_base = OTHER; note = uridine-3'-phosphate
  modified_base 16: mod_base = OTHER; note = adenosine-3'-phosphate
  modified_base 17: mod_base = OTHER; note = guanosine-3'-phosphate
  modified_base 18: mod_base = OTHER; note = guanosine-3'-phosphate
  modified_base 19: mod_base = OTHER; note = guanosine-3'-phosphate
  misc_feature 1..19: note = RNA
  misc_feature 20..21: note = DNA
tcatattcctggcctagggtt

SEQ ID NO: 643 - DNA, 21 bp, synthetic construct
  source 1..21: mol_type = other DNA
  modified_base 1: mod_base = OTHER; note = uridine-3'-phosphate
  modified_base 2: mod_base = OTHER; note = guanosine-3'-phosphate
  modified_base 3: mod_base = OTHER; note = guanosine-3'-phosphate
  modified_base 4: mod_base = OTHER; note = cytidine-3'-phosphate
  modified_base 5: mod_base = OTHER; note = uridine-3'-phosphate
  modified_base 6: mod_base = OTHER; note = uridine-3'-phosphate
  modified_base 7: mod_base = OTHER; note = guanosine-3'-phosphate
  modified_base 8: mod_base = OTHER; note = uridine-3'-phosphate
  modified_base 9: mod_base = OTHER; note = uridine-3'-phosphate
  modified_base 10: mod_base = OTHER; note = cytidine-3'-phosphate
  modified_base 11: mod_base = OTHER; note = adenosine-3'-phosphate
  modified_base 12: mod_base = OTHER; note = uridine-3'-phosphate
  modified_base 13: mod_base = OTHER; note = adenosine-3'-phosphate
  modified_base 14: mod_base = OTHER; note = uridine-3'-phosphate
  modified_base 15: mod_base = OTHER; note = uridine-3'-phosphate
  modified_base 16: mod_base = OTHER; note = cytidine-3'-phosphate
  modified_base 17: mod_base = OTHER; note = cytidine-3'-phosphate
  modified_base 18: mod_base = OTHER; note = uridine-3'-phosphate
  modified_base 19: mod_base = OTHER; note = guanosine-3'-phosphate
  misc_feature 1..19: note = RNA
  misc_feature 20..21: note = DNA
tggcttgttcatattcctgtt

SEQ ID NO: 644 - DNA, 21 bp, synthetic construct
  source 1..21: mol_type = other DNA
  modified_base 1: mod_base = OTHER; note = uridine-3'-phosphate
  modified_base 2: mod_base = OTHER; note = adenosine-3'-phosphate
  modified_base 3: mod_base = OTHER; note = guanosine-3'-phosphate
  modified_base 4: mod_base = OTHER; note = adenosine-3'-phosphate
  modified_base 5: mod_base = OTHER; note = uridine-3'-phosphate
  modified_base 6: mod_base = OTHER; note = cytidine-3'-phosphate
  modified_base 7: mod_base = OTHER; note = cytidine-3'-phosphate
  modified_base 8: mod_base = OTHER; note = adenosine-3'-phosphate
  modified_base 9: mod_base = OTHER; note = adenosine-3'-phosphate
  modified_base 10: mod_base = OTHER; note = adenosine-3'-phosphate
  modified_base 11: mod_base = OTHER; note = guanosine-3'-phosphate
  modified_base 12: mod_base = OTHER; note = cytidine-3'-phosphate
  modified_base 13: mod_base = OTHER; note = adenosine-3'-phosphate
  modified_base 14: mod_base = OTHER; note = guanosine-3'-phosphate
  modified_base 15: mod_base = OTHER; note = cytidine-3'-phosphate
  modified_base 16: mod_base = OTHER; note = guanosine-3'-phosphate
  modified_base 17: mod_base = OTHER; note = guanosine-3'-phosphate
  modified_base 18: mod_base = OTHER; note = cytidine-3'-phosphate
  modified_base 19: mod_base = OTHER; note = uridine-3'-phosphate
  misc_feature 1..19: note = RNA
  misc_feature 20..21: note = DNA
tagatccaaagcagcggcttt

SEQ ID NO: 645 - DNA, 21 bp, synthetic construct
  source 1..21: mol_type = other DNA
  modified_base 1: mod_base = OTHER; note = uridine-3'-phosphate
  modified_base 2: mod_base = OTHER; note = guanosine-3'-phosphate
  modified_base 3: mod_base = OTHER; note = cytidine-3'-phosphate
  modified_base 4: mod_base = OTHER; note = uridine-3'-phosphate
  modified_base 5: mod_base = OTHER; note = guanosine-3'-phosphate
  modified_base 6: mod_base = OTHER; note = guanosine-3'-phosphate
  modified_base 7: mod_base = OTHER; note = uridine-3'-phosphate
  modified_base 8: mod_base = OTHER; note = guanosine-3'-phosphate
  modified_base 9: mod_base = OTHER; note = adenosine-3'-phosphate
  modified_base 10: mod_base = OTHER; note = guanosine-3'-phosphate
  modified_base 11: mod_base = OTHER; note = guanosine-3'-phosphate
  modified_base 12: mod_base = OTHER; note = adenosine-3'-phosphate
  modified_base 13: mod_base = OTHER; note = cytidine-3'-phosphate
  modified_base 14: mod_base = OTHER; note = adenosine-3'-phosphate
  modified_base 15: mod_base = OTHER; note = guanosine-3'-phosphate
  modified_base 16: mod_base = OTHER; note = adenosine-3'-phosphate
  modified_base 17: mod_base = OTHER; note = guanosine-3'-phosphate
  modified_base 18: mod_base = OTHER; note = adenosine-3'-phosphate
  modified_base 19: mod_base = OTHER; note = uridine-3'-phosphate
  misc_feature 1..19: note = RNA
  misc_feature 20..21: note = DNA
tgctggtgaggacagagattt

SEQ ID NO: 646 - DNA, 21 bp, synthetic construct
  source 1..21: mol_type = other DNA
  modified_base 1: mod_base = OTHER; note = adenosine-3'-phosphate
  modified_base 2: mod_base = OTHER; note = adenosine-3'-phosphate
  modified_base 3: mod_base = OTHER; note = adenosine-3'-phosphate
  modified_base 4: mod_base = OTHER; note = guanosine-3'-phosphate
  modified_base 5: mod_base = OTHER; note = guanosine-3'-phosphate
  modified_base 6: mod_base = OTHER; note = cytidine-3'-phosphate
  modified_base 7: mod_base = OTHER; note = uridine-3'-phosphate
  modified_base 8: mod_base = OTHER; note = uridine-3'-phosphate
  modified_base 9: mod_base = OTHER; note = cytidine-3'-phosphate
  modified_base 10: mod_base = OTHER; note = cytidine-3'-phosphate
  modified_base 11: mod_base = OTHER; note = adenosine-3'-phosphate
  modified_base 12: mod_base = OTHER; note = guanosine-3'-phosphate
  modified_base 13: mod_base = OTHER; note = guanosine-3'-phosphate
  modified_base 14: mod_base = OTHER; note = adenosine-3'-phosphate
  modified_base 15: mod_base = OTHER; note = guanosine-3'-phosphate
  modified_base 16: mod_base = OTHER; note = guanosine-3'-phosphate
  modified_base 17: mod_base = OTHER; note = cytidine-3'-phosphate
  modified_base 18: mod_base = OTHER; note = uridine-3'-phosphate
  modified_base 19: mod_base = OTHER; note = guanosine-3'-phosphate
  misc_feature 1..19: note = RNA
  misc_feature 20..21: note = DNA
aaaggcttccaggaggctgtt

SEQ ID NO: 647 - DNA, 21 bp, synthetic construct
  source 1..21: mol_type = other DNA
  modified_base 1: mod_base = OTHER; note = uridine-3'-phosphate
  modified_base 2: mod_base = OTHER; note = guanosine-3'-phosphate
  modified_base 3: mod_base = OTHER; note = adenosine-3'-phosphate
  modified_base 4: mod_base = OTHER; note = guanosine-3'-phosphate
  modified_base 5: mod_base = OTHER; note = guanosine-3'-phosphate
  modified_base 6: mod_base = OTHER; note = uridine-3'-phosphate
  modified_base 7: mod_base = OTHER; note = cytidine-3'-phosphate
  modified_base 8: mod_base = OTHER; note = uridine-3'-phosphate
  modified_base 9: mod_base = OTHER; note = guanosine-3'-phosphate
  modified_base 10: mod_base = OTHER; note = uridine-3'-phosphate
  modified_base 11: mod_base = OTHER; note = guanosine-3'-phosphate
  modified_base 12: mod_base = OTHER; note = uridine-3'-phosphate
  modified_base 13: mod_base = OTHER; note = guanosine-3'-phosphate
  modified_base 14: mod_base = OTHER; note = adenosine-3'-phosphate
  modified_base 15: mod_base = OTHER; note = guanosine-3'-phosphate
  modified_base 16: mod_base = OTHER; note = cytidine-3'-phosphate
  modified_base 17: mod_base = OTHER; note = adenosine-3'-phosphate
  modified_base 18: mod_base = OTHER; note = adenosine-3'-phosphate
  modified_base 19: mod_base = OTHER; note = adenosine-3'-phosphate
  misc_feature 1..19: note = RNA
  misc_feature 20..21: note = DNA
tgaggtctgtgtgagcaaatt

SEQ ID NO: 648 - DNA, 21 bp, synthetic construct
  source 1..21: mol_type = other DNA
  modified_base 1: mod_base = OTHER; note = adenosine-3'-phosphate
  modified_base 2: mod_base = OTHER; note = adenosine-3'-phosphate
  modified_base 3: mod_base = OTHER; note = adenosine-3'-phosphate
  modified_base 4: mod_base = OTHER; note = cytidine-3'-phosphate
  modified_base 5: mod_base = OTHER; note = adenosine-3'-phosphate
  modified_base 6: mod_base = OTHER; note = cytidine-3'-phosphate
  modified_base 7: mod_base = OTHER; note = cytidine-3'-phosphate
  modified_base 8: mod_base = OTHER; note = uridine-3'-phosphate
  modified_base 9: mod_base = OTHER; note = uridine-3'-phosphate
  modified_base 10: mod_base = OTHER; note = cytidine-3'-phosphate
  modified_base 11: mod_base = OTHER; note = cytidine-3'-phosphate
  modified_base 12: mod_base = OTHER; note = cytidine-3'-phosphate
  modified_base 13: mod_base = OTHER; note = adenosine-3'-phosphate
  modified_base 14: mod_base = OTHER; note = cytidine-3'-phosphate
  modified_base 15: mod_base = OTHER; note = uridine-3'-phosphate
  modified_base 16: mod_base = OTHER; note = guanosine-3'-phosphate
  modified_base 17: mod_base = OTHER; note = adenosine-3'-phosphate
  modified_base 18: mod_base = OTHER; note = guanosine-3'-phosphate
  modified_base 19: mod_base = OTHER; note = guanosine-3'-phosphate
  misc_feature 1..19: note = RNA
  misc_feature 20..21: note = DNA
aaacaccttcccactgaggtt

SEQ ID NO: 649 - DNA, 21 bp, synthetic construct
  source 1..21: mol_type = other DNA
  modified_base 1: mod_base = OTHER; note = uridine-3'-phosphate
  modified_base 2: mod_base = OTHER; note = guanosine-3'-phosphate
  modified_base 3: mod_base = OTHER; note = adenosine-3'-phosphate
  modified_base 4: mod_base = OTHER; note = adenosine-3'-phosphate
  modified_base 5: mod_base = OTHER; note = adenosine-3'-phosphate
  modified_base 6: mod_base = OTHER; note = uridine-3'-phosphate
  modified_base 7: mod_base = OTHER; note = adenosine-3'-phosphate
  modified_base 8: mod_base = OTHER; note = cytidine-3'-phosphate
  modified_base 9: mod_base = OTHER; note = adenosine-3'-phosphate
  modified_base 10: mod_base = OTHER; note = adenosine-3'-phosphate
  modified_base 11: mod_base = OTHER; note = adenosine-3'-phosphate
  modified_base 12: mod_base = OTHER; note = cytidine-3'-phosphate
  modified_base 13: mod_base = OTHER; note = adenosine-3'-phosphate
  modified_base 14: mod_base = OTHER; note = cytidine-3'-phosphate
  modified_base 15: mod_base = OTHER; note = cytidine-3'-phosphate
  modified_base 16: mod_base = OTHER; note = uridine-3'-phosphate
  modified_base 17: mod_base = OTHER; note = uridine-3'-phosphate
  modified_base 18: mod_base = OTHER; note = cytidine-3'-phosphate
  modified_base 19: mod_base = OTHER; note = cytidine-3'-phosphate
  misc_feature 1..19: note = RNA
  misc_feature 20..21: note = DNA
tgaaatacaaacaccttcctt

SEQ ID NO: 650 - DNA, 21 bp, synthetic construct
  source 1..21: mol_type = other DNA
  modified_base 1: mod_base = OTHER; note = uridine-3'-phosphate
  modified_base 2: mod_base = OTHER; note = uridine-3'-phosphate
  modified_base 3: mod_base = OTHER; note = adenosine-3'-phosphate
  modified_base 4: mod_base = OTHER; note = adenosine-3'-phosphate
  modified_base 5: mod_base = OTHER; note = cytidine-3'-phosphate
  modified_base 6: mod_base = OTHER; note = adenosine-3'-phosphate
  modified_base 7: mod_base = OTHER; note = guanosine-3'-phosphate
  modified_base 8: mod_base = OTHER; note = adenosine-3'-phosphate
  modified_base 9: mod_base = OTHER; note = uridine-3'-phosphate
  modified_base 10: mod_base = OTHER; note = uridine-3'-phosphate
  modified_base 11: mod_base = OTHER; note = cytidine-3'-phosphate
  modified_base 12: mod_base = OTHER; note = uridine-3'-phosphate
  modified_base 13: mod_base = OTHER; note = cytidine-3'-phosphate
  modified_base 14: mod_base = OTHER; note = uridine-3'-phosphate
  modified_base 15: mod_base = OTHER; note = adenosine-3'-phosphate
  modified_base 16: mod_base = OTHER; note = guanosine-3'-phosphate
  modified_base 17: mod_base = OTHER; note = guanosine-3'-phosphate
  modified_base 18: mod_base = OTHER; note = adenosine-3'-phosphate
  modified_base 19: mod_base = OTHER; note = adenosine-3'-phosphate
  misc_feature 1..19: note = RNA
  misc_feature 20..21: note = DNA
ttaacagattctctaggaatt

SEQ ID NO: 651 - DNA, 21 bp, synthetic construct
  source 1..21: mol_type = other DNA
  modified_base 1: mod_base = OTHER; note = adenosine-3'-phosphate
  modified_base 2: mod_base = OTHER; note = adenosine-3'-phosphate
  modified_base 3: mod_base = OTHER; note = guanosine-3'-phosphate
  modified_base 4: mod_base = OTHER; note = uridine-3'-phosphate
  modified_base 5: mod_base = OTHER; note = uridine-3'-phosphate
  modified_base 6: mod_base = OTHER; note = uridine-3'-phosphate
  modified_base 7: mod_base = OTHER; note = adenosine-3'-phosphate
  modified_base 8: mod_base = OTHER; note = cytidine-3'-phosphate
  modified_base 9: mod_base = OTHER; note = adenosine-3'-phosphate
  modified_base 10: mod_base = OTHER; note = uridine-3'-phosphate
  modified_base 11: mod_base = OTHER; note = guanosine-3'-phosphate
  modified_base 12: mod_base = OTHER; note = adenosine-3'-phosphate
  modified_base 13: mod_base = OTHER; note = uridine-3'-phosphate
  modified_base 14: mod_base = OTHER; note = cytidine-3'-phosphate
  modified_base 15: mod_base = OTHER; note = adenosine-3'-phosphate
  modified_base 16: mod_base = OTHER; note = guanosine-3'-phosphate
  modified_base 17: mod_base = OTHER; note = uridine-3'-phosphate
  modified_base 18: mod_base = OTHER; note = adenosine-3'-phosphate
  modified_base 19: mod_base = OTHER; note = adenosine-3'-phosphate
  misc_feature 1..19: note = RNA
  misc_feature 20..21: note = DNA
aagtttacatgatcagtaatt

SEQ ID NO: 652 - DNA, 21 bp, synthetic construct
  source 1..21: mol_type = other DNA
  modified_base 1: mod_base = OTHER; note = uridine-3'-phosphate
  modified_base 2: mod_base = OTHER; note = cytidine-3'-phosphate
  modified_base 3: mod_base = OTHER; note = adenosine-3'-phosphate
  modified_base 4: mod_base = OTHER; note = guanosine-3'-phosphate
  modified_base 5: mod_base = OTHER; note = cytidine-3'-phosphate
  modified_base 6: mod_base = OTHER; note = guanosine-3'-phosphate
  modified_base 7: mod_base = OTHER; note = guanosine-3'-phosphate
  modified_base 8: mod_base = OTHER; note = uridine-3'-phosphate
  modified_base 9: mod_base = OTHER; note = guanosine-3'-phosphate
  modified_base 10: mod_base = OTHER; note = uridine-3'-phosphate
  modified_base 11: mod_base = OTHER; note = guanosine-3'-phosphate
  modified_base 12: mod_base = OTHER; note = adenosine-3'-phosphate
  modified_base 13: mod_base = OTHER; note = uridine-3'-phosphate
  modified_base 14: mod_base = OTHER; note = cytidine-3'-phosphate
  modified_base 15: mod_base = OTHER; note = adenosine-3'-phosphate
  modified_base 16: mod_base = OTHER; note = adenosine-3'-phosphate
  modified_base 17: mod_base = OTHER; note = guanosine-3'-phosphate
  modified_base 18: mod_base = OTHER; note = uridine-3'-phosphate
  modified_base 19: mod_base = OTHER; note = uridine-3'-phosphate
  misc_feature 1..19: note = RNA
  misc_feature 20..21: note = DNA
tcagcggtgtgatcaagtttt

SEQ ID NO: 653 - DNA, 21 bp, synthetic construct
  source 1..21: mol_type = other DNA
  modified_base 1: mod_base = OTHER; note = uridine-3'-phosphate
  modified_base 2: mod_base = OTHER; note = uridine-3'-phosphate
  modified_base 3: mod_base = OTHER; note = guanosine-3'-phosphate
  modified_base 4: mod_base = OTHER; note = uridine-3'-phosphate
  modified_base 5: mod_base = OTHER; note = adenosine-3'-phosphate
  modified_base 6: mod_base = OTHER; note = guanosine-3'-phosphate
  modified_base 7: mod_base = OTHER; note = adenosine-3'-phosphate
  modified_base 8: mod_base = OTHER; note = guanosine-3'-phosphate
  modified_base 9: mod_base = OTHER; note = guanosine-3'-phosphate
  modified_base 10: mod_base = OTHER; note = cytidine-3'-phosphate
  modified_base 11: mod_base = OTHER; note = uridine-3'-phosphate
  modified_base 12: mod_base = OTHER; note = uridine-3'-phosphate
  modified_base 13: mod_base = OTHER; note = cytidine-3'-phosphate
  modified_base 14: mod_base = OTHER; note = uridine-3'-phosphate
  modified_base 15: mod_base = OTHER; note = cytidine-3'-phosphate
  modified_base 16: mod_base = OTHER; note = cytidine-3'-phosphate
  modified_base 17: mod_base = OTHER; note = adenosine-3'-phosphate
  modified_base 18: mod_base = OTHER; note = guanosine-3'-phosphate
  modified_base 19: mod_base = OTHER; note = cytidine-3'-phosphate
  misc_feature 1..19: note = RNA
  misc_feature 20..21: note = DNA
ttgtagaggcttctccagctt

SEQ ID NO: 654 - DNA, 21 bp, synthetic construct
  source 1..21: mol_type = other DNA
  modified_base 1: mod_base = OTHER; note = uridine-3'-phosphate
  modified_base 2: mod_base = OTHER; note = adenosine-3'-phosphate
  modified_base 3: mod_base = OTHER; note = cytidine-3'-phosphate
  modified_base 4: mod_base = OTHER; note = adenosine-3'-phosphate
  modified_base 5: mod_base = OTHER; note = adenosine-3'-phosphate
  modified_base 6: mod_base = OTHER; note = guanosine-3'-phosphate
  modified_base 7: mod_base = OTHER; note = guanosine-3'-phosphate
  modified_base 8: mod_base = OTHER; note = uridine-3'-phosphate
  modified_base 9: mod_base = OTHER; note = adenosine-3'-phosphate
  modified_base 10: mod_base = OTHER; note = adenosine-3'-phosphate
  modified_base 11: mod_base = OTHER; note = adenosine-3'-phosphate
  modified_base 12: mod_base = OTHER; note = guanosine-3'-phosphate
  modified_base 13: mod_base = OTHER; note = uridine-3'-phosphate
  modified_base 14: mod_base = OTHER; note = uridine-3'-phosphate
  modified_base 15: mod_base = OTHER; note = cytidine-3'-phosphate
  modified_base 16: mod_base = OTHER; note = uridine-3'-phosphate
  modified_base 17: mod_base = OTHER; note = guanosine-3'-phosphate
  modified_base 18: mod_base = OTHER; note = uridine-3'-phosphate
  modified_base 19: mod_base = OTHER; note = adenosine-3'-phosphate
  misc_feature 1..19: note = RNA
  misc_feature 20..21: note = DNA
tacaaggtaaagttctgtatt

SEQ ID NO: 655 - DNA, 21 bp, synthetic construct
  source 1..21: mol_type = other DNA
  modified_base 1: mod_base = OTHER; note = uridine-3'-phosphate
  modified_base 2: mod_base = OTHER; note = guanosine-3'-phosphate
  modified_base 3: mod_base = OTHER; note = adenosine-3'-phosphate
  modified_base 4: mod_base = OTHER; note = adenosine-3'-phosphate
  modified_base 5: mod_base = OTHER; note = adenosine-3'-phosphate
  modified_base 6: mod_base = OTHER; note = adenosine-3'-phosphate
  modified_base 7: mod_base = OTHER; note = cytidine-3'-phosphate
  modified_base 8: mod_base = OTHER; note = adenosine-3'-phosphate
  modified_base 9: mod_base = OTHER; note = cytidine-3'-phosphate
  modified_base 10: mod_base = OTHER; note = adenosine-3'-phosphate
  modified_base 11: mod_base = OTHER; note = adenosine-3'-phosphate
  modified_base 12: mod_base = OTHER; note = guanosine-3'-phosphate
  modified_base 13: mod_base = OTHER; note = guanosine-3'-phosphate
  modified_base 14: mod_base = OTHER; note = uridine-3'-phosphate
  modified_base 15: mod_base = OTHER; note = adenosine-3'-phosphate
  modified_base 16: mod_base = OTHER; note = adenosine-3'-phosphate
  modified_base 17: mod_base = OTHER; note = adenosine-3'-phosphate
  modified_base 18: mod_base = OTHER; note = guanosine-3'-phosphate
  modified_base 19: mod_base = OTHER; note = uridine-3'-phosphate
  misc_feature 1..19: note = RNA
  misc_feature 20..21: note = DNA
tgaaaacacaaggtaaagttt

SEQ ID NO: 656 - DNA, 21 bp, synthetic construct
  source 1..21: mol_type = other DNA
  modified_base 1: mod_base = OTHER; note = adenosine-3'-phosphate
  modified_base 2: mod_base = OTHER; note = guanosine-3'-phosphate
  modified_base 3: mod_base = OTHER; note = adenosine-3'-phosphate
  modified_base 4: mod_base = OTHER; note = uridine-3'-phosphate
  modified_base 5: mod_base = OTHER; note = cytidine-3'-phosphate
  modified_base 6: mod_base = OTHER; note = adenosine-3'-phosphate
  modified_base 7: mod_base = OTHER; note = cytidine-3'-phosphate
  modified_base 8: mod_base = OTHER; note = uridine-3'-phosphate
  modified_base 9: mod_base = OTHER; note = adenosine-3'-phosphate
  modified_base 10: mod_base = OTHER; note = uridine-3'-phosphate
  modified_base 11: mod_base = OTHER; note = adenosine-3'-phosphate
  modified_base 12: mod_base = OTHER; note = guanosine-3'-phosphate
  modified_base 13: mod_base = OTHER; note = guanosine-3'-phosphate
  modified_base 14: mod_base = OTHER; note = cytidine-3'-phosphate
  modified_base 15: mod_base = OTHER; note = uridine-3'-phosphate
  modified_base 16: mod_base = OTHER; note = cytidine-3'-phosphate
  modified_base 17: mod_base = OTHER; note = guanosine-3'-phosphate
  modified_base 18: mod_base = OTHER; note = adenosine-3'-phosphate
  modified_base 19: mod_base = OTHER; note = adenosine-3'-phosphate
  misc_feature 1..19: note = RNA
  misc_feature 20..21: note = DNA
agatcactataggctcgaatt

SEQ ID NO: 657 - DNA, 21 bp, synthetic construct
  source 1..21: mol_type = other DNA
  modified_base 1: mod_base = OTHER; note = uridine-3'-phosphate
  modified_base 2: mod_base = OTHER; note = guanosine-3'-phosphate
  modified_base 3: mod_base = OTHER; note = uridine-3'-phosphate
  modified_base 4: mod_base = OTHER; note = adenosine-3'-phosphate
  modified_base 5: mod_base = OTHER; note = guanosine-3'-phosphate
  modified_base 6: mod_base = OTHER; note = guanosine-3'-phosphate
  modified_base 7: mod_base = OTHER; note = cytidine-3'-phosphate
  modified_base 8: mod_base = OTHER; note = adenosine-3'-phosphate
  modified_base 9: mod_base = OTHER; note = cytidine-3'-phosphate
  modified_base 10: mod_base = OTHER; note = guanosine-3'-phosphate
  modified_base 11: mod_base = OTHER; note = adenosine-3'-phosphate
  modified_base 12: mod_base = OTHER; note = guanosine-3'-phosphate
  modified_base 13: mod_base = OTHER; note = adenosine-3'-phosphate
  modified_base 14: mod_base = OTHER; note = guanosine-3'-phosphate
  modified_base 15: mod_base = OTHER; note = adenosine-3'-phosphate
  modified_base 16: mod_base = OTHER; note = guanosine-3'-phosphate
  modified_base 17: mod_base = OTHER; note = adenosine-3'-phosphate
  modified_base 18: mod_base = OTHER; note = uridine-3'-phosphate
  modified_base 19: mod_base = OTHER; note = cytidine-3'-phosphate
  misc_feature 1..19: note = RNA
  misc_feature 20..21: note = DNA
tgtaggcacgagagagatctt

SEQ ID NO: 658 - DNA, 21 bp, synthetic construct
  source 1..21: mol_type = other DNA
  modified_base 1: mod_base = OTHER; note = adenosine-3'-phosphate
  modified_base 2: mod_base = OTHER; note = guanosine-3'-phosphate
  modified_base 3: mod_base = OTHER; note = adenosine-3'-phosphate
  modified_base 4: mod_base = OTHER; note = guanosine-3'-phosphate
  modified_base 5: mod_base = OTHER; note = guanosine-3'-phosphate
  modified_base 6: mod_base = OTHER; note = cytidine-3'-phosphate
  modified_base 7: mod_base = OTHER; note = uridine-3'-phosphate
  modified_base 8: mod_base = OTHER; note = guanosine-3'-phosphate
  modified_base 9: mod_base = OTHER; note = uridine-3'-phosphate
  modified_base 10: mod_base = OTHER; note = adenosine-3'-phosphate
  modified_base 11: mod_base = OTHER; note = guanosine-3'-phosphate
  modified_base 12: mod_base = OTHER; note = guanosine-3'-phosphate
  modified_base 13: mod_base = OTHER; note = cytidine-3'-phosphate
  modified_base 14: mod_base = OTHER; note = adenosine-3'-phosphate
  modified_base 15: mod_base = OTHER; note = cytidine-3'-phosphate
  modified_base 16: mod_base = OTHER; note = guanosine-3'-phosphate
  modified_base 17: mod_base = OTHER; note = adenosine-3'-phosphate
  modified_base 18: mod_base = OTHER; note = guanosine-3'-phosphate
  modified_base 19: mod_base = OTHER; note = adenosine-3'-phosphate
  misc_feature 1..19: note = RNA
  misc_feature 20..21: note = DNA
agaggctgtaggcacgagatt

SEQ ID NO: 659 - DNA, 21 bp, synthetic construct
  source 1..21: mol_type = other DNA
  modified_base 1: mod_base = OTHER; note = adenosine-3'-phosphate
  modified_base 2: mod_base = OTHER; note = uridine-3'-phosphate
  modified_base 3: mod_base = OTHER; note = uridine-3'-phosphate
  modified_base 4: mod_base = OTHER; note = guanosine-3'-phosphate
  modified_base 5: mod_base = OTHER; note = uridine-3'-phosphate
  modified_base 6: mod_base = OTHER; note = adenosine-3'-phosphate
  modified_base 7: mod_base = OTHER; note = guanosine-3'-phosphate
  modified_base 8: mod_base = OTHER; note = guanosine-3'-phosphate
  modified_base 9: mod_base = OTHER; note = adenosine-3'-phosphate
  modified_base 10: mod_base = OTHER; note = guanosine-3'-phosphate
  modified_base 11: mod_base = OTHER; note = adenosine-3'-phosphate
  modified_base 12: mod_base = OTHER; note = adenosine-3'-phosphate
  modified_base 13: mod_base = OTHER; note = guanosine-3'-phosphate
  modified_base 14: mod_base = OTHER; note = adenosine-3'-phosphate
  modified_base 15: mod_base = OTHER; note = guanosine-3'-phosphate
  modified_base 16: mod_base = OTHER; note = guanosine-3'-phosphate
  modified_base 17: mod_base = OTHER; note = cytidine-3'-phosphate
  modified_base 18: mod_base = OTHER; note = uridine-3'-phosphate
  modified_base 19: mod_base = OTHER; note = guanosine-3'-phosphate
  misc_feature 1..19: note = RNA
  misc_feature 20..21: note = DNA
attgtaggagaagaggctgtt

SEQ ID NO: 660 - DNA, 21 bp, synthetic construct
  source 1..21: mol_type = other DNA
  modified_base 1: mod_base = OTHER; note = adenosine-3'-phosphate
  modified_base 2: mod_base = OTHER; note = uridine-3'-phosphate
  modified_base 3: mod_base = OTHER; note = cytidine-3'-phosphate
  modified_base 4: mod_base = OTHER; note = cytidine-3'-phosphate
  modified_base 5: mod_base = OTHER; note = cytidine-3'-phosphate
  modified_base 6: mod_base = OTHER; note = uridine-3'-phosphate
  modified_base 7: mod_base = OTHER; note = guanosine-3'-phosphate
  modified_base 8: mod_base = OTHER; note = cytidine-3'-phosphate
  modified_base 9: mod_base = OTHER; note = cytidine-3'-phosphate
  modified_base 10: mod_base = OTHER; note = uridine-3'-phosphate
  modified_base 11: mod_base = OTHER; note = uridine-3'-phosphate
  modified_base 12: mod_base = OTHER; note = guanosine-3'-phosphate
  modified_base 13: mod_base = OTHER; note = guanosine-3'-phosphate
  modified_base 14: mod_base = OTHER; note = guanosine-3'-phosphate
  modified_base 15: mod_base = OTHER; note = uridine-3'-phosphate
  modified_base 16: mod_base = OTHER; note = adenosine-3'-phosphate
  modified_base 17: mod_base = OTHER; note = uridine-3'-phosphate
  modified_base 18: mod_base = OTHER; note = uridine-3'-phosphate
  modified_base 19: mod_base = OTHER; note = guanosine-3'-phosphate
  misc_feature 1..19: note = RNA
  misc_feature 20..21: note = DNA
atccctgccttgggtattgtt

SEQ ID NO: 661 - DNA, 21 bp, synthetic construct
  source 1..21: mol_type = other DNA
  modified_base 1: mod_base = OTHER; note = adenosine-3'-phosphate
  modified_base 2: mod_base = OTHER; note = cytidine-3'-phosphate
  modified_base 3: mod_base = OTHER; note = uridine-3'-phosphate
  modified_base 4: mod_base = OTHER; note = adenosine-3'-phosphate
  modified_base 5: mod_base = OTHER; note = guanosine-3'-phosphate
  modified_base 6: mod_base = OTHER; note = uridine-3'-phosphate
  modified_base 7: mod_base = OTHER; note = adenosine-3'-phosphate
  modified_base 8: mod_base = OTHER; note = guanosine-3'-phosphate
  modified_base 9: mod_base = OTHER; note = cytidine-3'-phosphate
  modified_base 10: mod_base = OTHER; note = uridine-3'-phosphate
  modified_base 11: mod_base = OTHER; note = cytidine-3'-phosphate
  modified_base 12: mod_base = OTHER; note = adenosine-3'-phosphate
  modified_base 13: mod_base = OTHER; note = uridine-3'-phosphate
  modified_base 14: mod_base = OTHER; note = uridine-3'-phosphate
  modified_base 15: mod_base = OTHER; note = adenosine-3'-phosphate
  modified_base 16: mod_base = OTHER; note = uridine-3'-phosphate
  modified_base 17: mod_base = OTHER; note = cytidine-3'-phosphate
  modified_base 18: mod_base = OTHER; note = cytidine-3'-phosphate
  modified_base 19: mod_base = OTHER; note = cytidine-3'-phosphate
  misc_feature 1..19: note = RNA
  misc_feature 20..21: note = DNA
actagtagctcattatccctt

SEQ ID NO: 662 - DNA, 21 bp, synthetic construct
  source 1..21: mol_type = other DNA
  modified_base 1: mod_base = OTHER; note = adenosine-3'-phosphate
  modified_base 2: mod_base = OTHER; note = cytidine-3'-phosphate
  modified_base 3: mod_base = OTHER; note = uridine-3'-phosphate
  modified_base 4: mod_base = OTHER; note = cytidine-3'-phosphate
  modified_base 5: mod_base = OTHER; note = uridine-3'-phosphate
  modified_base 6: mod_base = OTHER; note = uridine-3'-phosphate
  modified_base 7: mod_base = OTHER; note = uridine-3'-phosphate
  modified_base 8: mod_base = OTHER; note = cytidine-3'-phosphate
  modified_base 9: mod_base = OTHER; note = uridine-3'-phosphate
  modified_base 10: mod_base = OTHER; note = uridine-3'-phosphate
  modified_base 11: mod_base = OTHER; note = uridine-3'-phosphate
  modified_base 12: mod_base = OTHER; note = adenosine-3'-phosphate
  modified_base 13: mod_base = OTHER; note = uridine-3'-phosphate
  modified_base 14: mod_base = OTHER; note = adenosine-3'-phosphate
  modified_base 15: mod_base = OTHER; note = adenosine-3'-phosphate
  modified_base 16: mod_base = OTHER; note = adenosine-3'-phosphate
  modified_base 17: mod_base = OTHER; note = cytidine-3'-phosphate
  modified_base 18: mod_base = OTHER; note = uridine-3'-phosphate
  modified_base 19: mod_base = OTHER; note = adenosine-3'-phosphate
  misc_feature 1..19: note = RNA
  misc_feature 20..21: note = DNA
actctttctttataaactatt

SEQ ID NO: 663 - DNA, 21 bp, synthetic construct
  source 1..21: mol_type = other DNA
  modified_base 1: mod_base = OTHER; note = uridine-3'-phosphate
  modified_base 2: mod_base = OTHER; note = adenosine-3'-phosphate
  modified_base 3: mod_base = OTHER; note = cytidine-3'-phosphate
  modified_base 4: mod_base = OTHER; note = uridine-3'-phosphate
  modified_base 5: mod_base = OTHER; note = adenosine-3'-phosphate
  modified_base 6: mod_base = OTHER; note = uridine-3'-phosphate
  modified_base 7: mod_base = OTHER; note = adenosine-3'-phosphate
  modified_base 8: mod_base = OTHER; note = cytidine-3'-phosphate
  modified_base 9: mod_base = OTHER; note = uridine-3'-phosphate
  modified_base 10: mod_base = OTHER; note = cytidine-3'-phosphate
  modified_base 11: mod_base = OTHER; note = uridine-3'-phosphate
  modified_base 12: mod_base = OTHER; note = cytidine-3'-phosphate
  modified_base 13: mod_base = OTHER; note = cytidine-3'-phosphate
  modified_base 14: mod_base = OTHER; note = adenosine-3'-phosphate
  modified_base 15: mod_base = OTHER; note = adenosine-3'-phosphate
  modified_base 16: mod_base = OTHER; note = cytidine-3'-phosphate
  modified_base 17: mod_base = OTHER; note = uridine-3'-phosphate
  modified_base 18: mod_base = OTHER; note = cytidine-3'-phosphate
  modified_base 19: mod_base = OTHER; note = uridine-3'-phosphate
  misc_feature 1..19: note = RNA
  misc_feature 20..21: note = DNA
tactatactctccaactcttt

SEQ ID NO: 664 - DNA, 21 bp, synthetic construct
  source 1..21: mol_type = other DNA
  modified_base 1: mod_base = OTHER; note = uridine-3'-phosphate
  modified_base 2: mod_base = OTHER; note = cytidine-3'-phosphate
  modified_base 3: mod_base = OTHER; note = uridine-3'-phosphate
  modified_base 4: mod_base = OTHER; note = uridine-3'-phosphate
  modified_base 5: mod_base = OTHER; note = cytidine-3'-phosphate
  modified_base 6: mod_base = OTHER; note = cytidine-3'-phosphate
  modified_base 7: mod_base = OTHER; note = adenosine-3'-phosphate
  modified_base 8: mod_base = OTHER; note = adenosine-3'-phosphate
  modified_base 9: mod_base = OTHER; note = uridine-3'-phosphate
  modified_base 10: mod_base = OTHER; note = guanosine-3'-phosphate
  modified_base 11: mod_base = OTHER; note = uridine-3'-phosphate
  modified_base 12: mod_base = OTHER; note = adenosine-3'-phosphate
  modified_base 13: mod_base = OTHER; note = uridine-3'-phosphate
  modified_base 14: mod_base = OTHER; note = adenosine-3'-phosphate
  modified_base 15: mod_base = OTHER; note = guanosine-3'-phosphate
  modified_base 16: mod_base = OTHER; note = adenosine-3'-phosphate
  modified_base 17: mod_base = OTHER; note = cytidine-3'-phosphate
  modified_base 18: mod_base = OTHER; note = uridine-3'-phosphate
  modified_base 19: mod_base = OTHER; note = adenosine-3'-phosphate
  misc_feature 1..19: note = RNA
  misc_feature 20..21: note = DNA
tcttccaatgtatagactatt

SEQ ID NO: 665 - DNA, 21 bp, synthetic construct
  source 1..21: mol_type = other DNA
  modified_base 1: mod_base = OTHER; note = uridine-3'-phosphate
  modified_base 2: mod_base = OTHER; note = uridine-3'-phosphate
  modified_base 3: mod_base = OTHER; note = adenosine-3'-phosphate
  modified_base 4: mod_base = OTHER; note = adenosine-3'-phosphate
  modified_base 5: mod_base = OTHER; note = cytidine-3'-phosphate
  modified_base 6: mod_base = OTHER; note = uridine-3'-phosphate
  modified_base 7: mod_base = OTHER; note = uridine-3'-phosphate
  modified_base 8: mod_base = OTHER; note = uridine-3'-phosphate
  modified_base 9: mod_base = OTHER; note = guanosine-3'-phosphate
  modified_base 10: mod_base = OTHER; note = uridine-3'-phosphate
  modified_base 11: mod_base = OTHER; note = guanosine-3'-phosphate
  modified_base 12: mod_base = OTHER; note = uridine-3'-phosphate
  modified_base 13: mod_base = OTHER; note = cytidine-3'-phosphate
  modified_base 14: mod_base = OTHER; note = uridine-3'-phosphate
  modified_base 15: mod_base = OTHER; note = uridine-3'-phosphate
  modified_base 16: mod_base = OTHER; note = cytidine-3'-phosphate
  modified_base 17: mod_base = OTHER; note = cytidine-3'-phosphate
  modified_base 18: mod_base = OTHER; note = adenosine-3'-phosphate
  modified_base 19: mod_base = OTHER; note = adenosine-3'-phosphate
  misc_feature 1..19: note = RNA
  misc_feature 20..21: note = DNA
ttaactttgtgtcttccaatt

SEQ ID NO: 666 - DNA, 21 bp, synthetic construct
  source 1..21: mol_type = other DNA
  modified_base 1: mod_base = OTHER; note = cytidine-3'-phosphate
  modified_base 2: mod_base = OTHER; note = uridine-3'-phosphate
  modified_base 3: mod_base = OTHER; note = uridine-3'-phosphate
  modified_base 4: mod_base = OTHER; note = uridine-3'-phosphate
  modified_base 5: mod_base = OTHER; note = guanosine-3'-phosphate
  modified_base 6: mod_base = OTHER; note = guanosine-3'-phosphate
  modified_base 7: mod_base = OTHER; note = adenosine-3'-phosphate
  modified_base 8: mod_base = OTHER; note = uridine-3'-phosphate
  modified_base 9: mod_base = OTHER; note = guanosine-3'-phosphate
  modified_base 10: mod_base = OTHER; note = uridine-3'-phosphate
  modified_base 11: mod_base = OTHER; note = adenosine-3'-phosphate
  modified_base 12: mod_base = OTHER; note = adenosine-3'-phosphate
  modified_base 13: mod_base = OTHER; note = cytidine-3'-phosphate
  modified_base 14: mod_base = OTHER; note = uridine-3'-phosphate
  modified_base 15: mod_base = OTHER; note = uridine-3'-phosphate
  modified_base 16: mod_base = OTHER; note = uridine-3'-phosphate
  modified_base 17: mod_base = OTHER; note = guanosine-3'-phosphate
  modified_base 18: mod_base = OTHER; note = uridine-3'-phosphate
  modified_base 19: mod_base = OTHER; note = guanosine-3'-phosphate
  misc_feature 1..19: note = RNA
  misc_feature 20..21: note = DNA
ctttggatgtaactttgtgtt

SEQ ID NO: 667 - DNA, 21 bp, synthetic construct
  source 1..21: mol_type = other DNA
  modified_base 1: mod_base = OTHER; note = uridine-3'-phosphate
  modified_base 2: mod_base = OTHER; note = guanosine-3'-phosphate
  modified_base 3: mod_base = OTHER; note = adenosine-3'-phosphate
  modified_base 4: mod_base = OTHER; note = adenosine-3'-phosphate
  modified_base 5: mod_base = OTHER; note = cytidine-3'-phosphate
  modified_base 6: mod_base = OTHER; note = uridine-3'-phosphate
  modified_base 7: mod_base = OTHER; note = uridine-3'-phosphate
  modified_base 8: mod_base = OTHER; note = uridine-3'-phosphate
  modified_base 9: mod_base = OTHER; note = uridine-3'-phosphate
  modified_base 10: mod_base = OTHER; note = cytidine-3'-phosphate
  modified_base 11: mod_base = OTHER; note = guanosine-3'-phosphate
  modified_base 12: mod_base = OTHER; note = adenosine-3'-phosphate
  modified_base 13: mod_base = OTHER; note = uridine-3'-phosphate
  modified_base 14: mod_base = OTHER; note = adenosine-3'-phosphate
  modified_base 15: mod_base = OTHER; note = adenosine-3'-phosphate
  modified_base 16: mod_base = OTHER; note = cytidine-3'-phosphate
  modified_base 17: mod_base = OTHER; note = uridine-3'-phosphate
  modified_base 18: mod_base = OTHER; note = uridine-3'-phosphate
  modified_base 19: mod_base = OTHER; note = uridine-3'-phosphate
  misc_feature 1..19: note = RNA
  misc_feature 20..21: note = DNA
tgaacttttcgataacttttt

SEQ ID NO: 668 - DNA, 21 bp, synthetic construct
  source 1..21: mol_type = other DNA
  modified_base 1: mod_base = OTHER; note = uridine-3'-phosphate
  modified_base 2: mod_base = OTHER; note = uridine-3'-phosphate
  modified_base 3: mod_base = OTHER; note = guanosine-3'-phosphate
  modified_base 4: mod_base = OTHER; note = cytidine-3'-phosphate
  modified_base 5: mod_base = OTHER; note = adenosine-3'-phosphate
  modified_base 6: mod_base = OTHER; note = cytidine-3'-phosphate
  modified_base 7: mod_base = OTHER; note = uridine-3'-phosphate
  modified_base 8: mod_base = OTHER; note = guanosine-3'-phosphate
  modified_base 9: mod_base = OTHER; note = guanosine-3'-phosphate
  modified_base 10: mod_base = OTHER; note = adenosine-3'-phosphate
  modified_base 11: mod_base = OTHER; note = guanosine-3'-phosphate
  modified_base 12: mod_base = OTHER; note = cytidine-3'-phosphate
  modified_base 13: mod_base = OTHER; note = cytidine-3'-phosphate
  modified_base 14: mod_base = OTHER; note = guanosine-3'-phosphate
  modified_base 15: mod_base = OTHER; note = guanosine-3'-phosphate
  modified_base 16: mod_base = OTHER; note = guanosine-3'-phosphate
  modified_base 17: mod_base = OTHER; note = adenosine-3'-phosphate
  modified_base 18: mod_base = OTHER; note = adenosine-3'-phosphate
  modified_base 19: mod_base = OTHER; note = cytidine-3'-phosphate
  misc_feature 1..19: note = RNA
  misc_feature 20..21: note = DNA
ttgcactggagccgggaactt

SEQ ID NO: 669 - DNA, 21 bp, synthetic construct
  source 1..21: mol_type = other DNA
  modified_base 1: mod_base = OTHER; note = uridine-3'-phosphate
  modified_base 2: mod_base = OTHER; note = adenosine-3'-phosphate
  modified_base 3: mod_base = OTHER; note = guanosine-3'-phosphate
  modified_base 4: mod_base = OTHER; note = cytidine-3'-phosphate
  modified_base 5: mod_base = OTHER; note = uridine-3'-phosphate
  modified_base 6: mod_base = OTHER; note = cytidine-3'-phosphate
  modified_base 7: mod_base = OTHER; note = adenosine-3'-phosphate
  modified_base 8: mod_base = OTHER; note = cytidine-3'-phosphate
  modified_base 9: mod_base = OTHER; note = adenosine-3'-phosphate
  modified_base 10: mod_base = OTHER; note = cytidine-3'-phosphate
  modified_base 11: mod_base = OTHER; note = adenosine-3'-phosphate
  modified_base 12: mod_base = OTHER; note = guanosine-3'-phosphate
  modified_base 13: mod_base = OTHER; note = adenosine-3'-phosphate
  modified_base 14: mod_base = OTHER; note = uridine-3'-phosphate
  modified_base 15: mod_base = OTHER; note = guanosine-3'-phosphate
  modified_base 16: mod_base = OTHER; note = uridine-3'-phosphate
  modified_base 17: mod_base = OTHER; note = guanosine-3'-phosphate
  modified_base 18: mod_base = OTHER; note = cytidine-3'-phosphate
  modified_base 19: mod_base = OTHER; note = adenosine-3'-phosphate
  misc_feature 1..19: note = RNA
  misc_feature 20..21: note = DNA
tagctcacacagatgtgcatt

SEQ ID NO: 670 - DNA, 21 bp, synthetic construct
  source 1..21: mol_type = other DNA
  modified_base 1: mod_base = OTHER; note = uridine-3'-phosphate
  modified_base 2: mod_base = OTHER; note = uridine-3'-phosphate
  modified_base 3: mod_base = OTHER; note = guanosine-3'-phosphate
  modified_base 4: mod_base = OTHER; note = adenosine-3'-phosphate
  modified_base 5: mod_base = OTHER; note = uridine-3'-phosphate
  modified_base 6: mod_base = OTHER; note = guanosine-3'-phosphate
  modified_base 7: mod_base = OTHER; note = adenosine-3'-phosphate
  modified_base 8: mod_base = OTHER; note = guanosine-3'-phosphate
  modified_base 9: mod_base = OTHER; note = guanosine-3'-phosphate
  modified_base 10: mod_base = OTHER; note = adenosine-3'-phosphate
  modified_base 11: mod_base = OTHER; note = cytidine-3'-phosphate
  modified_base 12: mod_base = OTHER; note = uridine-3'-phosphate
  modified_base 13: mod_base = OTHER; note = cytidine-3'-phosphate
  modified_base 14: mod_base = OTHER; note = cytidine-3'-phosphate
  modified_base 15: mod_base = OTHER; note = cytidine-3'-phosphate
  modified_base 16: mod_base = OTHER; note = adenosine-3'-phosphate
  modified_base 17: mod_base = OTHER; note = guanosine-3'-phosphate
  modified_base 18: mod_base = OTHER; note = cytidine-3'-phosphate
  modified_base 19: mod_base = OTHER; note = uridine-3'-phosphate
  misc_feature 1..19: note = RNA
  misc_feature 20..21: note = DNA
ttgatgaggactcccagcttt

SEQ ID NO: 671 - DNA, 21 bp, synthetic construct
  source 1..21: mol_type = other DNA
  modified_base 1: mod_base = OTHER; note = adenosine-3'-phosphate
  modified_base 2: mod_base = OTHER; note = uridine-3'-phosphate
  modified_base 3: mod_base = OTHER; note = cytidine-3'-phosphate
  modified_base 4: mod_base = OTHER; note = cytidine-3'-phosphate
  modified_base 5: mod_base = OTHER; note = adenosine-3'-phosphate
  modified_base 6: mod_base = OTHER; note = adenosine-3'-phosphate
  modified_base 7: mod_base = OTHER; note = adenosine-3'-phosphate
  modified_base 8: mod_base = OTHER; note = adenosine-3'-phosphate
  modified_base 9: mod_base = OTHER; note = uridine-3'-phosphate
  modified_base 10: mod_base = OTHER; note = uridine-3'-phosphate
  modified_base 11: mod_base = OTHER; note = cytidine-3'-phosphate
  modified_base 12: mod_base = OTHER; note = adenosine-3'-phosphate
  modified_base 13: mod_base = OTHER; note = guanosine-3'-phosphate
  modified_base 14: mod_base = OTHER; note = cytidine-3'-phosphate
  modified_base 15: mod_base = OTHER; note = adenosine-3'-phosphate
  modified_base 16: mod_base = OTHER; note = adenosine-3'-phosphate
  modified_base 17: mod_base = OTHER; note = uridine-3'-phosphate
  modified_base 18: mod_base = OTHER; note = adenosine-3'-phosphate
  modified_base 19: mod_base = OTHER; note = cytidine-3'-phosphate
  misc_feature 1..19: note = RNA
  misc_feature 20..21: note = DNA
atccaaaattcagcaatactt

SEQ ID NO: 672 - DNA, 21 bp, synthetic construct
  source 1..21: mol_type = other DNA
  modified_base 1: mod_base = OTHER; note = adenosine-3'-phosphate
  modified_base 2: mod_base = OTHER; note = adenosine-3'-phosphate
  modified_base 3: mod_base = OTHER; note = adenosine-3'-phosphate
  modified_base 4: mod_base = OTHER; note = guanosine-3'-phosphate
  modified_base 5: mod_base = OTHER; note = guanosine-3'-phosphate
  modified_base 6: mod_base = OTHER; note = uridine-3'-phosphate
  modified_base 7: mod_base = OTHER; note = guanosine-3'-phosphate
  modified_base 8: mod_base = OTHER; note = uridine-3'-phosphate
  modified_base 9: mod_base = OTHER; note = cytidine-3'-phosphate
  modified_base 10: mod_base = OTHER; note = cytidine-3'-phosphate
  modified_base 11: mod_base = OTHER; note = cytidine-3'-phosphate
  modified_base 12: mod_base = OTHER; note = adenosine-3'-phosphate
  modified_base 13: mod_base = OTHER; note = uridine-3'-phosphate
  modified_base 14: mod_base = OTHER; note = uridine-3'-phosphate
  modified_base 15: mod_base = OTHER; note = guanosine-3'-phosphate
  modified_base 16: mod_base = OTHER; note = adenosine-3'-phosphate
  modified_base 17: mod_base = OTHER; note = uridine-3'-phosphate
  modified_base 18: mod_base = OTHER; note = cytidine-3'-phosphate
  modified_base 19: mod_base = OTHER; note = cytidine-3'-phosphate
  misc_feature 1..19: note = RNA
  misc_feature 20..21: note = DNA
aaaggtgtcccattgatcctt

SEQ ID NO: 673 - DNA, 21 bp, synthetic construct
  source 1..21: mol_type = other DNA
  modified_base 1: mod_base = OTHER; note = adenosine-3'-phosphate
  modified_base 2: mod_base = OTHER; note = guanosine-3'-phosphate
  modified_base 3: mod_base = OTHER; note = adenosine-3'-phosphate
  modified_base 4: mod_base = OTHER; note = cytidine-3'-phosphate
  modified_base 5: mod_base = OTHER; note = cytidine-3'-phosphate
  modified_base 6: mod_base = OTHER; note = cytidine-3'-phosphate
  modified_base 7: mod_base = OTHER; note = uridine-3'-phosphate
  modified_base 8: mod_base = OTHER; note = uridine-3'-phosphate
  modified_base 9: mod_base = OTHER; note = uridine-3'-phosphate
  modified_base 10: mod_base = OTHER; note = uridine-3'-phosphate
  modified_base 11: mod_base = OTHER; note = uridine-3'-phosphate
  modified_base 12: mod_base = OTHER; note = cytidine-3'-phosphate
  modified_base 13: mod_base = OTHER; note = adenosine-3'-phosphate
  modified_base 14: mod_base = OTHER; note = cytidine-3'-phosphate
  modified_base 15: mod_base = OTHER; note = cytidine-3'-phosphate
  modified_base 16: mod_base = OTHER; note = adenosine-3'-phosphate
  modified_base 17: mod_base = OTHER; note = adenosine-3'-phosphate
  modified_base 18: mod_base = OTHER; note = adenosine-3'-phosphate
  modified_base 19: mod_base = OTHER; note = guanosine-3'-phosphate
  misc_feature 1..19: note = RNA
  misc_feature 20..21: note = DNA
agaccctttttcaccaaagtt

SEQ ID NO: 674 - DNA, 21 bp, synthetic construct
  source 1..21: mol_type = other DNA
  modified_base 1: mod_base = OTHER; note = adenosine-3'-phosphate
  modified_base 2: mod_base = OTHER; note = guanosine-3'-phosphate
  modified_base 3: mod_base = OTHER; note = uridine-3'-phosphate
  modified_base 4: mod_base = OTHER; note = adenosine-3'-phosphate
  modified_base 5: mod_base = OTHER; note = adenosine-3'-phosphate
  modified_base 6: mod_base = OTHER; note = cytidine-3'-phosphate
  modified_base 7: mod_base = OTHER; note = cytidine-3'-phosphate
  modified_base 8: mod_base = OTHER; note = cytidine-3'-phosphate
  modified_base 9: mod_base = OTHER; note = uridine-3'-phosphate
  modified_base 10: mod_base = OTHER; note = guanosine-3'-phosphate
  modified_base 11: mod_base = OTHER; note = uridine-3'-phosphate
  modified_base 12: mod_base = OTHER; note = cytidine-3'-phosphate
  modified_base 13: mod_base = OTHER; note = guanosine-3'-phosphate
  modified_base 14: mod_base = OTHER; note = cytidine-3'-phosphate
  modified_base 15: mod_base = OTHER; note = adenosine-3'-phosphate
  modified_base 16: mod_base = OTHER; note = guanosine-3'-phosphate
  modified_base 17: mod_base = OTHER; note = adenosine-3'-phosphate
  modified_base 18: mod_base = OTHER; note = cytidine-3'-phosphate
  modified_base 19: mod_base = OTHER; note = cytidine-3'-phosphate
  misc_feature 1..19: note = RNA
  misc_feature 20..21: note = DNA
agtaaccctgtcgcagacctt

SEQ ID NO: 675 - DNA, 21 bp, synthetic construct
  source 1..21: mol_type = other DNA
  modified_base 1: mod_base = OTHER; note = uridine-3'-phosphate
  modified_base 2: mod_base = OTHER; note = guanosine-3'-phosphate
  modified_base 3: mod_base = OTHER; note = guanosine-3'-phosphate
  modified_base 4: mod_base = OTHER; note = guanosine-3'-phosphate
  modified_base 5: mod_base = OTHER; note = cytidine-3'-phosphate
  modified_base 6: mod_base = OTHER; note = uridine-3'-phosphate
  modified_base 7: mod_base = OTHER; note = guanosine-3'-phosphate
  modified_base 8: mod_base = OTHER; note = adenosine-3'-phosphate
  modified_base 9: mod_base = OTHER; note = guanosine-3'-phosphate
  modified_base 10: mod_base = OTHER; note = cytidine-3'-phosphate
  modified_base 11: mod_base = OTHER; note = uridine-3'-phosphate
  modified_base 12: mod_base = OTHER; note = uridine-3'-phosphate
  modified_base 13: mod_base = OTHER; note = cytidine-3'-phosphate
  modified_base 14: mod_base = OTHER; note = uridine-3'-phosphate
  modified_base 15: mod_base = OTHER; note = adenosine-3'-phosphate
  modified_base 16: mod_base = OTHER; note = cytidine-3'-phosphate
  modified_base 17: mod_base = OTHER; note = adenosine-3'-phosphate
  modified_base 18: mod_base = OTHER; note = adenosine-3'-phosphate
  modified_base 19: mod_base = OTHER; note = adenosine-3'-phosphate
  misc_feature 1..19: note = RNA
  misc_feature 20..21: note = DNA
tgggctgagcttctacaaatt

SEQ ID NO: 676 - DNA, 21 bp, synthetic construct
  source 1..21: mol_type = other DNA
  modified_base 1: mod_base = OTHER; note = uridine-3'-phosphate
  modified_base 2: mod_base = OTHER; note = cytidine-3'-phosphate
  modified_base 3: mod_base = OTHER; note = cytidine-3'-phosphate
  modified_base 4: mod_base = OTHER; note = cytidine-3'-phosphate
  modified_base 5: mod_base = OTHER; note = adenosine-3'-phosphate
  modified_base 6: mod_base = OTHER; note = guanosine-3'-phosphate
  modified_base 7: mod_base = OTHER; note = guanosine-3'-phosphate
  modified_base 8: mod_base = OTHER; note = adenosine-3'-phosphate
  modified_base 9: mod_base = OTHER; note = cytidine-3'-phosphate
  modified_base 10: mod_base = OTHER; note = adenosine-3'-phosphate
  modified_base 11: mod_base = OTHER; note = adenosine-3'-phosphate
  modified_base 12: mod_base = OTHER; note = uridine-3'-phosphate
  modified_base 13: mod_base = OTHER; note = cytidine-3'-phosphate
  modified_base 14: mod_base = OTHER; note = uridine-3'-phosphate
  modified_base 15: mod_base = OTHER; note = uridine-3'-phosphate
  modified_base 16: mod_base = OTHER; note = guanosine-3'-phosphate
  modified_base 17: mod_base = OTHER; note = guanosine-3'-phosphate
  modified_base 18: mod_base = OTHER; note = guanosine-3'-phosphate
  modified_base 19: mod_base = OTHER; note = cytidine-3'-phosphate
  misc_feature 1..19: note = RNA
  misc_feature 20..21: note = DNA
tcccaggacaatcttgggctt

SEQ ID NO: 677 - DNA, 21 bp, synthetic construct
  source 1..21: mol_type = other DNA
  modified_base 1: mod_base = OTHER; note = uridine-3'-phosphate
  modified_base 2: mod_base = OTHER; note = adenosine-3'-phosphate
  modified_base 3: mod_base = OTHER; note = adenosine-3'-phosphate
  modified_base 4: mod_base = OTHER; note = uridine-3'-phosphate
  modified_base 5: mod_base = OTHER; note = cytidine-3'-phosphate
  modified_base 6: mod_base = OTHER; note = cytidine-3'-phosphate
  modified_base 7: mod_base = OTHER; note = uridine-3'-phosphate
  modified_base 8: mod_base = OTHER; note = guanosine-3'-phosphate
  modified_base 9: mod_base = OTHER; note = uridine-3'-phosphate
  modified_base 10: mod_base = OTHER; note = uridine-3'-phosphate
  modified_base 11: mod_base = OTHER; note = cytidine-3'-phosphate
  modified_base 12: mod_base = OTHER; note = cytidine-3'-phosphate
  modified_base 13: mod_base = OTHER; note = uridine-3'-phosphate
  modified_base 14: mod_base = OTHER; note = guanosine-3'-phosphate
  modified_base 15: mod_base = OTHER; note = cytidine-3'-phosphate
  modified_base 16: mod_base = OTHER; note = cytidine-3'-phosphate
  modified_base 17: mod_base = OTHER; note = cytidine-3'-phosphate
  modified_base 18: mod_base = OTHER; note = cytidine-3'-phosphate
  modified_base 19: mod_base = OTHER; note = adenosine-3'-phosphate
  misc_feature 1..19: note = RNA
  misc_feature 20..21: note = DNA
taatcctgttcctgccccatt

SEQ ID NO: 678 - DNA, 21 bp, synthetic construct
  source 1..21: mol_type = other DNA
  modified_base 1: mod_base = OTHER; note = uridine-3'-phosphate
  modified_base 2: mod_base = OTHER; note = adenosine-3'-phosphate
  modified_base 3: mod_base = OTHER; note = adenosine-3'-phosphate
  modified_base 4: mod_base = OTHER; note = adenosine-3'-phosphate
  modified_base 5: mod_base = OTHER; note = cytidine-3'-phosphate
  modified_base 6: mod_base = OTHER; note = uridine-3'-phosphate
  modified_base 7: mod_base = OTHER; note = uridine-3'-phosphate
  modified_base 8: mod_base = OTHER; note = guanosine-3'-phosphate
  modified_base 9: mod_base = OTHER; note = cytidine-3'-phosphate
  modified_base 10: mod_base = OTHER; note = cytidine-3'-phosphate
  modified_base 11: mod_base = OTHER; note = cytidine-3'-phosphate
  modified_base 12: mod_base = OTHER; note = cytidine-3'-phosphate
  modified_base 13: mod_base = OTHER; note = cytidine-3'-phosphate
  modified_base 14: mod_base = OTHER; note = adenosine-3'-phosphate
  modified_base 15: mod_base = OTHER; note = uridine-3'-phosphate
  modified_base 16: mod_base = OTHER; note = adenosine-3'-phosphate
  modified_base 17: mod_base = OTHER; note = guanosine-3'-phosphate
  modified_base 18: mod_base = OTHER; note = guanosine-3'-phosphate
  modified_base 19: mod_base = OTHER; note = adenosine-3'-phosphate
  misc_feature 1..19: note = RNA
  misc_feature 20..21: note = DNA
taaacttgcccccataggatt

SEQ ID NO: 679 - DNA, 21 bp, synthetic construct
  source 1..21: mol_type = other DNA
  modified_base 1: mod_base = OTHER; note = adenosine-3'-phosphate
  modified_base 2: mod_base = OTHER; note = guanosine-3'-phosphate
  modified_base 3: mod_base = OTHER; note = guanosine-3'-phosphate
  modified_base 4: mod_base = OTHER; note = adenosine-3'-phosphate
  modified_base 5: mod_base = OTHER; note = cytidine-3'-phosphate
  modified_base 6: mod_base = OTHER; note = uridine-3'-phosphate
  modified_base 7: mod_base = OTHER; note = guanosine-3'-phosphate
  modified_base 8: mod_base = OTHER; note = guanosine-3'-phosphate
  modified_base 9: mod_base = OTHER; note = cytidine-3'-phosphate
  modified_base 10: mod_base = OTHER; note = uridine-3'-phosphate
  modified_base 11: mod_base = OTHER; note = cytidine-3'-phosphate
  modified_base 12: mod_base = OTHER; note = cytidine-3'-phosphate
  modified_base 13: mod_base = OTHER; note = uridine-3'-phosphate
  modified_base 14: mod_base = OTHER; note = adenosine-3'-phosphate
  modified_base 15: mod_base = OTHER; note = uridine-3'-phosphate
  modified_base 16: mod_base = OTHER; note = cytidine-3'-phosphate
  modified_base 17: mod_base = OTHER; note = adenosine-3'-phosphate
  modified_base 18: mod_base = OTHER; note = adenosine-3'-phosphate
  modified_base 19: mod_base = OTHER; note = adenosine-3'-phosphate
  misc_feature 1..19: note = RNA
  misc_feature 20..21: note = DNA
aggactggctcctatcaaatt

SEQ ID NO: 680 - DNA, 21 bp, synthetic construct
  source 1..21: mol_type = other DNA
  modified_base 1: mod_base = OTHER; note = adenosine-3'-phosphate
  modified_base 2: mod_base = OTHER; note = adenosine-3'-phosphate
  modified_base 3: mod_base = OTHER; note = uridine-3'-phosphate
  modified_base 4: mod_base = OTHER; note = cytidine-3'-phosphate
  modified_base 5: mod_base = OTHER; note = uridine-3'-phosphate
  modified_base 6: mod_base = OTHER; note = cytidine-3'-phosphate
  modified_base 7: mod_base = OTHER; note = uridine-3'-phosphate
  modified_base 8: mod_base = OTHER; note = cytidine-3'-phosphate
  modified_base 9: mod_base = OTHER; note = cytidine-3'-phosphate
  modified_base 10: mod_base = OTHER; note = cytidine-3'-phosphate
  modified_base 11: mod_base = OTHER; note = adenosine-3'-phosphate
  modified_base 12: mod_base = OTHER; note = cytidine-3'-phosphate
  modified_base 13: mod_base = OTHER; note = adenosine-3'-phosphate
  modified_base 14: mod_base = OTHER; note = adenosine-3'-phosphate
  modified_base 15: mod_base = OTHER; note = adenosine-3'-phosphate
  modified_base 16: mod_base = OTHER; note = guanosine-3'-phosphate
  modified_base 17: mod_base = OTHER; note = guanosine-3'-phosphate
  modified_base 18: mod_base = OTHER; note = adenosine-3'-phosphate
  modified_base 19: mod_base = OTHER; note = cytidine-3'-phosphate
  misc_feature 1..19: note = RNA
  misc_feature 20..21: note = DNA
aatctctcccacaaaggactt

SEQ ID NO: 681 - DNA, 21 bp, synthetic construct
  source 1..21: mol_type = other DNA
  modified_base 1: mod_base = OTHER; note = adenosine-3'-phosphate
  modified_base 2: mod_base = OTHER; note = uridine-3'-phosphate
  modified_base 3: mod_base = OTHER; note = guanosine-3'-phosphate
  modified_base 4: mod_base = OTHER; note = uridine-3'-phosphate
  modified_base 5: mod_base = OTHER; note = adenosine-3'-phosphate
  modified_base 6: mod_base = OTHER; note = cytidine-3'-phosphate
  modified_base 7: mod_base = OTHER; note = adenosine-3'-phosphate
  modified_base 8: mod_base = OTHER; note = adenosine-3'-phosphate
  modified_base 9: mod_base = OTHER; note = adenosine-3'-phosphate
  modified_base 10: mod_base = OTHER; note = uridine-3'-phosphate
  modified_base 11: mod_base = OTHER; note = cytidine-3'-phosphate
  modified_base 12: mod_base = OTHER; note = cytidine-3'-phosphate
  modified_base 13: mod_base = OTHER; note = cytidine-3'-phosphate
  modified_base 14: mod_base = OTHER; note = cytidine-3'-phosphate
  modified_base 15: mod_base = OTHER; note = adenosine-3'-phosphate
  modified_base 16: mod_base = OTHER; note = adenosine-3'-phosphate
  modified_base 17: mod_base = OTHER; note = uridine-3'-phosphate
  modified_base 18: mod_base = OTHER; note = cytidine-3'-phosphate
  modified_base 19: mod_base = OTHER; note = uridine-3'-phosphate
  misc_feature 1..19: note = RNA
  misc_feature 20..21: note = DNA
atgtacaaatccccaatcttt

SEQ ID NO: 682 - DNA, 21 bp, synthetic construct
  source 1..21: mol_type = other DNA
  modified_base 1: mod_base = OTHER; note = adenosine-3'-phosphate
  modified_base 2: mod_base = OTHER; note = guanosine-3'-phosphate
  modified_base 3: mod_base = OTHER; note = adenosine-3'-phosphate
  modified_base 4: mod_base = OTHER; note = guanosine-3'-phosphate
  modified_base 5: mod_base = OTHER; note = uridine-3'-phosphate
  modified_base 6: mod_base = OTHER; note = cytidine-3'-phosphate
  modified_base 7: mod_base = OTHER; note = cytidine-3'-phosphate
  modified_base 8: mod_base = OTHER; note = cytidine-3'-phosphate
  modified_base 9: mod_base = OTHER; note = adenosine-3'-phosphate
  modified_base 10: mod_base = OTHER; note = cytidine-3'-phosphate
  modified_base 11: mod_base = OTHER; note = adenosine-3'-phosphate
  modified_base 12: mod_base = OTHER; note = uridine-3'-phosphate
  modified_base 13: mod_base = OTHER; note = guanosine-3'-phosphate
  modified_base 14: mod_base = OTHER; note = uridine-3'-phosphate
  modified_base 15: mod_base = OTHER; note = adenosine-3'-phosphate
  modified_base 16: mod_base = OTHER; note = cytidine-3'-phosphate
  modified_base 17: mod_base = OTHER; note = adenosine-3'-phosphate
  modified_base 18: mod_base = OTHER; note = adenosine-3'-phosphate
  modified_base 19: mod_base = OTHER; note = adenosine-3'-phosphate
  misc_feature 1..19: note = RNA
  misc_feature 20..21: note = DNA
agagtcccacatgtacaaatt

SEQ ID NO: 683 - DNA, 21 bp, synthetic construct
  source 1..21: mol_type = other DNA
  modified_base 1: mod_base = OTHER; note = uridine-3'-phosphate
  modified_base 2: mod_base = OTHER; note = cytidine-3'-phosphate
  modified_base 3: mod_base = OTHER; note = adenosine-3'-phosphate
  modified_base 4: mod_base = OTHER; note = guanosine-3'-phosphate
  modified_base 5: mod_base = OTHER; note = cytidine-3'-phosphate
  modified_base 6: mod_base = OTHER; note = adenosine-3'-phosphate
  modified_base 7: mod_base = OTHER; note = cytidine-3'-phosphate
  modified_base 8: mod_base = OTHER; note = adenosine-3'-phosphate
  modified_base 9: mod_base = OTHER; note = guanosine-3'-phosphate
  modified_base 10: mod_base = OTHER; note = adenosine-3'-phosphate
  modified_base 11: mod_base = OTHER; note = guanosine-3'-phosphate
  modified_base 12: mod_base = OTHER; note = uridine-3'-phosphate
  modified_base 13: mod_base = OTHER; note = cytidine-3'-phosphate
  modified_base 14: mod_base = OTHER; note = cytidine-3'-phosphate
  modified_base 15: mod_base = OTHER; note = cytidine-3'-phosphate
  modified_base 16: mod_base = OTHER; note = adenosine-3'-phosphate
  modified_base 17: mod_base = OTHER; note = cytidine-3'-phosphate
  modified_base 18: mod_base = OTHER; note = adenosine-3'-phosphate
  modified_base 19: mod_base = OTHER; note = uridine-3'-phosphate
  misc_feature 1..19: note = RNA
  misc_feature 20..21: note = DNA
tcagcacagagtcccacattt

SEQ ID NO: 684 - DNA, 21 bp, synthetic construct
  source 1..21: mol_type = other DNA
  modified_base 1: mod_base = OTHER; note = uridine-3'-phosphate
  modified_base 2: mod_base = OTHER; note = guanosine-3'-phosphate
  modified_base 3: mod_base = OTHER; note = adenosine-3'-phosphate
  modified_base 4: mod_base = OTHER; note = uridine-3'-phosphate
  modified_base 5: mod_base = OTHER; note = adenosine-3'-phosphate
  modified_base 6: mod_base = OTHER; note = uridine-3'-phosphate
  modified_base 7: mod_base = OTHER; note = uridine-3'-phosphate
  modified_base 8: mod_base = OTHER; note = uridine-3'-phosphate
  modified_base 9: mod_base = OTHER; note = uridine-3'-phosphate
  modified_base 10: mod_base = OTHER; note = cytidine-3'-phosphate
  modified_base 11: mod_base = OTHER; note = uridine-3'-phosphate
  modified_base 12: mod_base = OTHER; note = guanosine-3'-phosphate
  modified_base 13: mod_base = OTHER; note = guanosine-3'-phosphate
  modified_base 14: mod_base = OTHER; note = guanosine-3'-phosphate
  modified_base 15: mod_base = OTHER; note = guanosine-3'-phosphate
  modified_base 16: mod_base = OTHER; note = guanosine-3'-phosphate
  modified_base 17: mod_base = OTHER; note = cytidine-3'-phosphate
  modified_base 18: mod_base = OTHER; note = adenosine-3'-phosphate
  modified_base 19: mod_base = OTHER; note = guanosine-3'-phosphate
  misc_feature 1..19: note = RNA
  misc_feature 20..21: note = DNA
tgatattttctgggggcagtt

SEQ ID NO: 685 - DNA, 21 bp, synthetic construct
  source 1..21: mol_type = other DNA
  modified_base 1: mod_base = OTHER; note = uridine-3'-phosphate
  modified_base 2: mod_base = OTHER; note = uridine-3'-phosphate
  modified_base 3: mod_base = OTHER; note = guanosine-3'-phosphate
  modified_base 4: mod_base = OTHER; note = adenosine-3'-phosphate
  modified_base 5: mod_base = OTHER; note = uridine-3'-phosphate
  modified_base 6: mod_base = OTHER; note = adenosine-3'-phosphate
  modified_base 7: mod_base = OTHER; note = guanosine-3'-phosphate
  modified_base 8: mod_base = OTHER; note = guanosine-3'-phosphate
  modified_base 9: mod_base = OTHER; note = cytidine-3'-phosphate
  modified_base 10: mod_base = OTHER; note = adenosine-3'-phosphate
  modified_base 11: mod_base = OTHER; note = guanosine-3'-phosphate
  modified_base 12: mod_base = OTHER; note = adenosine-3'-phosphate
  modified_base 13: mod_base = OTHER; note = cytidine-3'-phosphate
  modified_base 14: mod_base = OTHER; note = adenosine-3'-phosphate
  modified_base 15: mod_base = OTHER; note = guanosine-3'-phosphate
  modified_base 16: mod_base = OTHER; note = guanosine-3'-phosphate
  modified_base 17: mod_base = OTHER; note = adenosine-3'-phosphate
  modified_base 18: mod_base = OTHER; note = uridine-3'-phosphate
  modified_base 19: mod_base = OTHER; note = adenosine-3'-phosphate
  misc_feature 1..19: note = RNA
  misc_feature 20..21: note = DNA
ttgataggcagacaggatatt

SEQ ID NO: 686 - DNA, 21 bp, synthetic construct
  source 1..21: mol_type = other DNA
  modified_base 1: mod_base = OTHER; note = adenosine-3'-phosphate
  modified_base 2: mod_base = OTHER; note = guanosine-3'-phosphate
  modified_base 3: mod_base = OTHER; note = adenosine-3'-phosphate
  modified_base 4: mod_base = OTHER; note = guanosine-3'-phosphate
  modified_base 5: mod_base = OTHER; note = guanosine-3'-phosphate
  modified_base 6: mod_base = OTHER; note = guanosine-3'-phosphate
  modified_base 7: mod_base = OTHER; note = guanosine-3'-phosphate
  modified_base 8: mod_base = OTHER; note = uridine-3'-phosphate
  modified_base 9: mod_base = OTHER; note = adenosine-3'-phosphate
  modified_base 10: mod_base = OTHER; note = cytidine-3'-phosphate
  modified_base 11: mod_base = OTHER; note = cytidine-3'-phosphate
  modified_base 12: mod_base = OTHER; note = cytidine-3'-phosphate
  modified_base 13: mod_base = OTHER; note = uridine-3'-phosphate
  modified_base 14: mod_base = OTHER; note = guanosine-3'-phosphate
  modified_base 15: mod_base = OTHER; note = adenosine-3'-phosphate
  modified_base 16: mod_base = OTHER; note = uridine-3'-phosphate
  modified_base 17: mod_base = OTHER; note = adenosine-3'-phosphate
  modified_base 18: mod_base = OTHER; note = guanosine-3'-phosphate
  modified_base 19: mod_base = OTHER; note = guanosine-3'-phosphate
  misc_feature 1..19: note = RNA
  misc_feature 20..21: note = DNA
agaggggtaccctgataggtt

SEQ ID NO: 687 - DNA, 21 bp, synthetic construct
  source 1..21: mol_type = other DNA
  modified_base 1: mod_base = OTHER; note = adenosine-3'-phosphate
  modified_base 2: mod_base = OTHER; note = guanosine-3'-phosphate
  modified_base 3: mod_base = OTHER; note = guanosine-3'-phosphate
  modified_base 4: mod_base = OTHER; note = adenosine-3'-phosphate
  modified_base 5: mod_base = OTHER; note = uridine-3'-phosphate
  modified_base 6: mod_base = OTHER; note = adenosine-3'-phosphate
  modified_base 7: mod_base = OTHER; note = uridine-3'-phosphate
  modified_base 8: mod_base = OTHER; note = uridine-3'-phosphate
  modified_base 9: mod_base = OTHER; note = guanosine-3'-phosphate
  modified_base 10: mod_base = OTHER; note = guanosine-3'-phosphate
  modified_base 11: mod_base = OTHER; note = cytidine-3'-phosphate
  modified_base 12: mod_base = OTHER; note = adenosine-3'-phosphate
  modified_base 13: mod_base = OTHER; note = guanosine-3'-phosphate
  modified_base 14: mod_base = OTHER; note = guanosine-3'-phosphate
  modified_base 15: mod_base = OTHER; note = guanosine-3'-phosphate
  modified_base 16: mod_base = OTHER; note = adenosine-3'-phosphate
  modified_base 17: mod_base = OTHER; note = guanosine-3'-phosphate
  modified_base 18: mod_base = OTHER; note = adenosine-3'-phosphate
  modified_base 19: mod_base = OTHER; note = guanosine-3'-phosphate
  misc_feature 1..19: note = RNA
  misc_feature 20..21: note = DNA
aggatattggcagggagagtt

SEQ ID NO: 688 - DNA, 21 bp, synthetic construct
  source 1..21: mol_type = other DNA
  modified_base 1: mod_base = OTHER; note = adenosine-3'-phosphate
  modified_base 2: mod_base = OTHER; note = guanosine-3'-phosphate
  modified_base 3: mod_base = OTHER; note = adenosine-3'-phosphate
  modified_base 4: mod_base = OTHER; note = guanosine-3'-phosphate
  modified_base 5: mod_base = OTHER; note = cytidine-3'-phosphate
  modified_base 6: mod_base = OTHER; note = cytidine-3'-phosphate
  modified_base 7: mod_base = OTHER; note = uridine-3'-phosphate
  modified_base 8: mod_base = OTHER; note = guanosine-3'-phosphate
  modified_base 9: mod_base = OTHER; note = cytidine-3'-phosphate
  modified_base 10: mod_base = OTHER; note = cytidine-3'-phosphate
  modified_base 11: mod_base = OTHER; note = adenosine-3'-phosphate
  modified_base 12: mod_base = OTHER; note = guanosine-3'-phosphate
  modified_base 13: mod_base = OTHER; note = uridine-3'-phosphate
  modified_base 14: mod_base = OTHER; note = cytidine-3'-phosphate
  modified_base 15: mod_base = OTHER; note = cytidine-3'-phosphate
  modified_base 16: mod_base = OTHER; note = adenosine-3'-phosphate
  modified_base 17: mod_base = OTHER; note = guanosine-3'-phosphate
  modified_base 18: mod_base = OTHER; note = guanosine-3'-phosphate
  modified_base 19: mod_base = OTHER; note = adenosine-3'-phosphate
  misc_feature 1..19: note = RNA
  misc_feature 20..21: note = DNA
agagcctgccagtccaggatt

SEQ ID NO: 689 - DNA, 21 bp, synthetic construct
  source 1..21: mol_type = other DNA
  modified_base 1: mod_base = OTHER; note = uridine-3'-phosphate
  modified_base 2: mod_base = OTHER; note = adenosine-3'-phosphate
  modified_base 3: mod_base = OTHER; note = uridine-3'-phosphate
  modified_base 4: mod_base = OTHER; note = adenosine-3'-phosphate
  modified_base 5: mod_base = OTHER; note = guanosine-3'-phosphate
  modified_base 6: mod_base = OTHER; note = uridine-3'-phosphate
  modified_base 7: mod_base = OTHER; note = uridine-3'-phosphate
  modified_base 8: mod_base = OTHER; note = cytidine-3'-phosphate
  modified_base 9: mod_base = OTHER; note = adenosine-3'-phosphate
  modified_base 10: mod_base = OTHER; note = guanosine-3'-phosphate
  modified_base 11: mod_base = OTHER; note = adenosine-3'-phosphate
  modified_base 12: mod_base = OTHER; note = guanosine-3'-phosphate
  modified_base 13: mod_base = OTHER; note = cytidine-3'-phosphate
  modified_base 14: mod_base = OTHER; note = cytidine-3'-phosphate
  modified_base 15: mod_base = OTHER; note = uridine-3'-phosphate
  modified_base 16: mod_base = OTHER; note = guanosine-3'-phosphate
  modified_base 17: mod_base = OTHER; note = cytidine-3'-phosphate
  modified_base 18: mod_base = OTHER; note = cytidine-3'-phosphate
  modified_base 19: mod_base = OTHER; note = adenosine-3'-phosphate
  misc_feature 1..19: note = RNA
  misc_feature 20..21: note = DNA
tatagttcagagcctgccatt

SEQ ID NO: 690 - DNA, 21 bp, synthetic construct
  source 1..21: mol_type = other DNA
  modified_base 1: mod_base = OTHER; note = uridine-3'-phosphate
  modified_base 2: mod_base = OTHER; note = adenosine-3'-phosphate
  modified_base 3: mod_base = OTHER; note = uridine-3'-phosphate
  modified_base 4: mod_base = OTHER; note = adenosine-3'-phosphate
  modified_base 5: mod_base = OTHER; note = uridine-3'-phosphate
  modified_base 6: mod_base = OTHER; note = cytidine-3'-phosphate
  modified_base 7: mod_base = OTHER; note = cytidine-3'-phosphate
  modified_base 8: mod_base = OTHER; note = uridine-3'-phosphate
  modified_base 9: mod_base = OTHER; note = cytidine-3'-phosphate
  modified_base 10: mod_base = OTHER; note = uridine-3'-phosphate
  modified_base 11: mod_base = OTHER; note = guanosine-3'-phosphate
  modified_base 12: mod_base = OTHER; note = adenosine-3'-phosphate
  modified_base 13: mod_base = OTHER; note = uridine-3'-phosphate
  modified_base 14: mod_base = OTHER; note = uridine-3'-phosphate
  modified_base 15: mod_base = OTHER; note = uridine-3'-phosphate
  modified_base 16: mod_base = OTHER; note = cytidine-3'-phosphate
  modified_base 17: mod_base = OTHER; note = adenosine-3'-phosphate
  modified_base 18: mod_base = OTHER; note = uridine-3'-phosphate
  modified_base 19: mod_base = OTHER; note = adenosine-3'-phosphate
  misc_feature 1..19: note = RNA
  misc_feature 20..21: note = DNA
tatatcctctgatttcatatt

SEQ ID NO: 691 - DNA, 21 bp, synthetic construct
  source 1..21: mol_type = other DNA
  modified_base 1: mod_base = OTHER; note = adenosine-3'-phosphate
  modified_base 2: mod_base = OTHER; note = guanosine-3'-phosphate
  modified_base 3: mod_base = OTHER; note = guanosine-3'-phosphate
  modified_base 4: mod_base = OTHER; note = guanosine-3'-phosphate
  modified_base 5: mod_base = OTHER; note = uridine-3'-phosphate
  modified_base 6: mod_base = OTHER; note = uridine-3'-phosphate
  modified_base 7: mod_base = OTHER; note = uridine-3'-phosphate
  modified_base 8: mod_base = OTHER; note = guanosine-3'-phosphate
  modified_base 9: mod_base = OTHER; note = adenosine-3'-phosphate
  modified_base 10: mod_base = OTHER; note = uridine-3'-phosphate
  modified_base 11: mod_base = OTHER; note = guanosine-3'-phosphate
  modified_base 12: mod_base = OTHER; note = adenosine-3'-phosphate
  modified_base 13: mod_base = OTHER; note = uridine-3'-phosphate
  modified_base 14: mod_base = OTHER; note = guanosine-3'-phosphate
  modified_base 15: mod_base = OTHER; note = adenosine-3'-phosphate
  modified_base 16: mod_base = OTHER; note = cytidine-3'-phosphate
  modified_base 17: mod_base = OTHER; note = adenosine-3'-phosphate
  modified_base 18: mod_base = OTHER; note = uridine-3'-phosphate
  modified_base 19: mod_base = OTHER; note = adenosine-3'-phosphate
  misc_feature 1..19: note = RNA
  misc_feature 20..21: note = DNA
agggtttgatgatgacatatt

SEQ ID NO: 692 - DNA, 21 bp, synthetic construct
  source 1..21: mol_type = other DNA
  modified_base 1: mod_base = OTHER; note = uridine-3'-phosphate
  modified_base 2: mod_base = OTHER; note = cytidine-3'-phosphate
  modified_base 3: mod_base = OTHER; note = adenosine-3'-phosphate
  modified_base 4: mod_base = OTHER; note = guanosine-3'-phosphate
  modified_base 5: mod_base = OTHER; note = adenosine-3'-phosphate
  modified_base 6: mod_base = OTHER; note = cytidine-3'-phosphate
  modified_base 7: mod_base = OTHER; note = cytidine-3'-phosphate
  modified_base 8: mod_base = OTHER; note = cytidine-3'-phosphate
  modified_base 9: mod_base = OTHER; note = adenosine-3'-phosphate
  modified_base 10: mod_base = OTHER; note = cytidine-3'-phosphate
  modified_base 11: mod_base = OTHER; note = adenosine-3'-phosphate
  modified_base 12: mod_base = OTHER; note = cytidine-3'-phosphate
  modified_base 13: mod_base = OTHER; note = cytidine-3'-phosphate
  modified_base 14: mod_base = OTHER; note = adenosine-3'-phosphate
  modified_base 15: mod_base = OTHER; note = adenosine-3'-phosphate
  modified_base 16: mod_base = OTHER; note = guanosine-3'-phosphate
  modified_base 17: mod_base = OTHER; note = guanosine-3'-phosphate
  modified_base 18: mod_base = OTHER; note = guanosine-3'-phosphate
  modified_base 19: mod_base = OTHER; note = uridine-3'-phosphate
  misc_feature 1..19: note = RNA
  misc_feature 20..21: note = DNA
tcagacccacaccaagggttt

SEQ ID NO: 693 - DNA, 21 bp, synthetic construct
  source 1..21: mol_type = other DNA
  modified_base 1: mod_base = OTHER; note = uridine-3'-phosphate
  modified_base 2: mod_base = OTHER; note = cytidine-3'-phosphate
  modified_base 3: mod_base = OTHER; note = adenosine-3'-phosphate
  modified_base 4: mod_base = OTHER; note = adenosine-3'-phosphate
  modified_base 5: mod_base = OTHER; note = guanosine-3'-phosphate
  modified_base 6: mod_base = OTHER; note = adenosine-3'-phosphate
  modified_base 7: mod_base = OTHER; note = cytidine-3'-phosphate
  modified_base 8: mod_base = OTHER; note = cytidine-3'-phosphate
  modified_base 9: mod_base = OTHER; note = uridine-3'-phosphate
  modified_base 10: mod_base = OTHER; note = cytidine-3'-phosphate
  modified_base 11: mod_base = OTHER; note = adenosine-3'-phosphate
  modified_base 12: mod_base = OTHER; note = guanosine-3'-phosphate
  modified_base 13: mod_base = OTHER; note = adenosine-3'-phosphate
  modified_base 14: mod_base = OTHER; note = cytidine-3'-phosphate
  modified_base 15: mod_base = OTHER; note = cytidine-3'-phosphate
  modified_base 16: mod_base = OTHER; note = cytidine-3'-phosphate
  modified_base 17: mod_base = OTHER; note = adenosine-3'-phosphate
  modified_base 18: mod_base = OTHER; note = cytidine-3'-phosphate
  modified_base 19: mod_base = OTHER; note = adenosine-3'-phosphate
  misc_feature 1..19: note = RNA
  misc_feature 20..21: note = DNA
tcaagacctcagacccacatt

SEQ ID NO: 694 - DNA, 21 bp, synthetic construct
  source 1..21: mol_type = other DNA
  modified_base 1: mod_base = OTHER; note = adenosine-3'-phosphate
  modified_base 2: mod_base = OTHER; note = guanosine-3'-phosphate
  modified_base 3: mod_base = OTHER; note = uridine-3'-phosphate
  modified_base 4: mod_base = OTHER; note = guanosine-3'-phosphate
  modified_base 5: mod_base = OTHER; note = cytidine-3'-phosphate
  modified_base 6: mod_base = OTHER; note = uridine-3'-phosphate
  modified_base 7: mod_base = OTHER; note = cytidine-3'-phosphate
  modified_base 8: mod_base = OTHER; note = uridine-3'-phosphate
  modified_base 9: mod_base = OTHER; note = cytidine-3'-phosphate
  modified_base 10: mod_base = OTHER; note = guanosine-3'-phosphate
  modified_base 11: mod_base = OTHER; note = uridine-3'-phosphate
  modified_base 12: mod_base = OTHER; note = uridine-3'-phosphate
  modified_base 13: mod_base = OTHER; note = guanosine-3'-phosphate
  modified_base 14: mod_base = OTHER; note = adenosine-3'-phosphate
  modified_base 15: mod_base = OTHER; note = guanosine-3'-phosphate
  modified_base 16: mod_base = OTHER; note = uridine-3'-phosphate
  modified_base 17: mod_base = OTHER; note = cytidine-3'-phosphate
  modified_base 18: mod_base = OTHER; note = adenosine-3'-phosphate
  modified_base 19: mod_base = OTHER; note = adenosine-3'-phosphate
  misc_feature 1..19: note = RNA
  misc_feature 20..21: note = DNA
agtgctctcgttgagtcaatt

SEQ ID NO: 695 - DNA, 21 bp, synthetic construct
  source 1..21: mol_type = other DNA
  modified_base 1: mod_base = OTHER; note = uridine-3'-phosphate
  modified_base 2: mod_base = OTHER; note = cytidine-3'-phosphate
  modified_base 3: mod_base = OTHER; note = adenosine-3'-phosphate
  modified_base 4: mod_base = OTHER; note = uridine-3'-phosphate
  modified_base 5: mod_base = OTHER; note = uridine-3'-phosphate
  modified_base 6: mod_base = OTHER; note = uridine-3'-phosphate
  modified_base 7: mod_base = OTHER; note = cytidine-3'-phosphate
  modified_base 8: mod_base = OTHER; note = adenosine-3'-phosphate
  modified_base 9: mod_base = OTHER; note = uridine-3'-phosphate
  modified_base 10: mod_base = OTHER; note = uridine-3'-phosphate
  modified_base 11: mod_base = OTHER; note = uridine-3'-phosphate
  modified_base 12: mod_base = OTHER; note = uridine-3'-phosphate
  modified_base 13: mod_base = OTHER; note = cytidine-3'-phosphate
  modified_base 14: mod_base = OTHER; note = adenosine-3'-phosphate
  modified_base 15: mod_base = OTHER; note = adenosine-3'-phosphate
  modified_base 16: mod_base = OTHER; note = guanosine-3'-phosphate
  modified_base 17: mod_base = OTHER; note = uridine-3'-phosphate
  modified_base 18: mod_base = OTHER; note = guanosine-3'-phosphate
  modified_base 19: mod_base = OTHER; note = cytidine-3'-phosphate
  misc_feature 1..19: note = RNA
  misc_feature 20..21: note = DNA
tcatttcattttcaagtgctt

SEQ ID NO: 696 - DNA, 21 bp, synthetic construct
  source 1..21: mol_type = other DNA
  modified_base 1: mod_base = OTHER; note = uridine-3'-phosphate
  modified_base 2: mod_base = OTHER; note = adenosine-3'-phosphate
  modified_base 3: mod_base = OTHER; note = uridine-3'-phosphate
  modified_base 4: mod_base = OTHER; note = cytidine-3'-phosphate
  modified_base 5: mod_base = OTHER; note = uridine-3'-phosphate
  modified_base 6: mod_base = OTHER; note = cytidine-3'-phosphate
  modified_base 7: mod_base = OTHER; note = uridine-3'-phosphate
  modified_base 8: mod_base = OTHER; note = uridine-3'-phosphate
  modified_base 9: mod_base = OTHER; note = adenosine-3'-phosphate
  modified_base 10: mod_base = OTHER; note = guanosine-3'-phosphate
  modified_base 11: mod_base = OTHER; note = adenosine-3'-phosphate
  modified_base 12: mod_base = OTHER; note = cytidine-3'-phosphate
  modified_base 13: mod_base = OTHER; note = adenosine-3'-phosphate
  modified_base 14: mod_base = OTHER; note = guanosine-3'-phosphate
  modified_base 15: mod_base = OTHER; note = uridine-3'-phosphate
  modified_base 16: mod_base = OTHER; note = cytidine-3'-phosphate
  modified_base 17: mod_base = OTHER; note = adenosine-3'-phosphate
  modified_base 18: mod_base = OTHER; note = uridine-3'-phosphate
  modified_base 19: mod_base = OTHER; note = uridine-3'-phosphate
  misc_feature 1..19: note = RNA
  misc_feature 20..21: note = DNA
tatctcttagacagtcatttt

SEQ ID NO: 697 - DNA, 21 bp, synthetic construct
  source 1..21: mol_type = other DNA
  modified_base 1: mod_base = OTHER; note = adenosine-3'-phosphate
  modified_base 2: mod_base = OTHER; note = guanosine-3'-phosphate
  modified_base 3: mod_base = OTHER; note = uridine-3'-phosphate
  modified_base 4: mod_base = OTHER; note = uridine-3'-phosphate
  modified_base 5: mod_base = OTHER; note = guanosine-3'-phosphate
  modified_base 6: mod_base = OTHER; note = cytidine-3'-phosphate
  modified_base 7: mod_base = OTHER; note = uridine-3'-phosphate
  modified_base 8: mod_base = OTHER; note = uridine-3'-phosphate
  modified_base 9: mod_base = OTHER; note = uridine-3'-phosphate
  modified_base 10: mod_base = OTHER; note = guanosine-3'-phosphate
  modified_base 11: mod_base = OTHER; note = adenosine-3'-phosphate
  modified_base 12: mod_base = OTHER; note = cytidine-3'-phosphate
  modified_base 13: mod_base = OTHER; note = cytidine-3'-phosphate
  modified_base 14: mod_base = OTHER; note = adenosine-3'-phosphate
  modified_base 15: mod_base = OTHER; note = guanosine-3'-phosphate
  modified_base 16: mod_base = OTHER; note = adenosine-3'-phosphate
  modified_base 17: mod_base = OTHER; note = uridine-3'-phosphate
  modified_base 18: mod_base = OTHER; note = cytidine-3'-phosphate
  modified_base 19: mod_base = OTHER; note = uridine-3'-phosphate
  misc_feature 1..19: note = RNA
  misc_feature 20..21: note = DNA
agttgctttgaccagatcttt

SEQ ID NO: 698 - DNA, 21 bp, synthetic construct
  source 1..21: mol_type = other DNA
  modified_base 1: mod_base = OTHER; note = uridine-3'-phosphate
  modified_base 2: mod_base = OTHER; note = uridine-3'-phosphate
  modified_base 3: mod_base = OTHER; note = adenosine-3'-phosphate
  modified_base 4: mod_base = OTHER; note = guanosine-3'-phosphate
  modified_base 5: mod_base = OTHER; note = uridine-3'-phosphate
  modified_base 6: mod_base = OTHER; note = adenosine-3'-phosphate
  modified_base 7: mod_base = OTHER; note = uridine-3'-phosphate
  modified_base 8: mod_base = OTHER; note = cytidine-3'-phosphate
  modified_base 9: mod_base = OTHER; note = cytidine-3'-phosphate
  modified_base 10: mod_base = OTHER; note = adenosine-3'-phosphate
  modified_base 11: mod_base = OTHER; note = guanosine-3'-phosphate
  modified_base 12: mod_base = OTHER; note = uridine-3'-phosphate
  modified_base 13: mod_base = OTHER; note = uridine-3'-phosphate
  modified_base 14: mod_base = OTHER; note = guanosine-3'-phosphate
  modified_base 15: mod_base = OTHER; note = cytidine-3'-phosphate
  modified_base 16: mod_base = OTHER; note = uridine-3'-phosphate
  modified_base 17: mod_base = OTHER; note = uridine-3'-phosphate
  modified_base 18: mod_base = OTHER; note = uridine-3'-phosphate
  modified_base 19: mod_base = OTHER; note = guanosine-3'-phosphate
  misc_feature 1..19: note = RNA
  misc_feature 20..21: note = DNA
ttagtatccagttgctttgtt

SEQ ID NO: 699 - DNA, 21 bp, synthetic construct
  source 1..21: mol_type = other DNA
  modified_base 1: mod_base = OTHER; note = uridine-3'-phosphate
  modified_base 2: mod_base = OTHER; note = uridine-3'-phosphate
  modified_base 3: mod_base = OTHER; note = guanosine-3'-phosphate
  modified_base 4: mod_base = OTHER; note = cytidine-3'-phosphate
  modified_base 5: mod_base = OTHER; note = adenosine-3'-phosphate
  modified_base 6: mod_base = OTHER; note = guanosine-3'-phosphate
  modified_base 7: mod_base = OTHER; note = adenosine-3'-phosphate
  modified_base 8: mod_base = OTHER; note = uridine-3'-phosphate
  modified_base 9: mod_base = OTHER; note = guanosine-3'-phosphate
  modified_base 10: mod_base = OTHER; note = uridine-3'-phosphate
  modified_base 11: mod_base = OTHER; note = adenosine-3'-phosphate
  modified_base 12: mod_base = OTHER; note = adenosine-3'-phosphate
  modified_base 13: mod_base = OTHER; note = guanosine-3'-phosphate
  modified_base 14: mod_base = OTHER; note = adenosine-3'-phosphate
  modified_base 15: mod_base = OTHER; note = uridine-3'-phosphate
  modified_base 16: mod_base = OTHER; note = cytidine-3'-phosphate
  modified_base 17: mod_base = OTHER; note = uridine-3'-phosphate
  modified_base 18: mod_base = OTHER; note = adenosine-3'-phosphate
  modified_base 19: mod_base = OTHER; note = guanosine-3'-phosphate
  misc_feature 1..19: note = RNA
  misc_feature 20..21: note = DNA
ttgcagatgtaagatctagtt

SEQ ID NO: 700 - DNA, 21 bp, synthetic construct
  source 1..21: mol_type = other DNA
  modified_base 1: mod_base = OTHER; note = uridine-3'-phosphate
  modified_base 2: mod_base = OTHER; note = cytidine-3'-phosphate
  modified_base 3: mod_base = OTHER; note = adenosine-3'-phosphate
  modified_base 4: mod_base = OTHER; note = adenosine-3'-phosphate
  modified_base 5: mod_base = OTHER; note = adenosine-3'-phosphate
  modified_base 6: mod_base = OTHER; note = guanosine-3'-phosphate
  modified_base 7: mod_base = OTHER; note = adenosine-3'-phosphate
  modified_base 8: mod_base = OTHER; note = adenosine-3'-phosphate
  modified_base 9: mod_base = OTHER; note = guanosine-3'-phosphate
  modified_base 10: mod_base = OTHER; note = adenosine-3'-phosphate
  modified_base 11: mod_base = OTHER; note = adenosine-3'-phosphate
  modified_base 12: mod_base = OTHER; note = adenosine-3'-phosphate
  modified_base 13: mod_base = OTHER; note = guanosine-3'-phosphate
  modified_base 14: mod_base = OTHER; note = adenosine-3'-phosphate
  modified_base 15: mod_base = OTHER; note = guanosine-3'-phosphate
  modified_base 16: mod_base = OTHER; note = cytidine-3'-phosphate
  modified_base 17: mod_base = OTHER; note = uridine-3'-phosphate
  modified_base 18: mod_base = OTHER; note = guanosine-3'-phosphate
  modified_base 19: mod_base = OTHER; note = cytidine-3'-phosphate
  misc_feature 1..19: note = RNA
  misc_feature 20..21: note = DNA
tcaaagaagaaagagctgctt

SEQ ID NO: 701 - DNA, 21 bp, synthetic construct
  source 1..21: mol_type = other DNA
  modified_base 1: mod_base = OTHER; note = adenosine-3'-phosphate
  modified_base 2: mod_base = OTHER; note = uridine-3'-phosphate
  modified_base 3: mod_base = OTHER; note = adenosine-3'-phosphate
  modified_base 4: mod_base = OTHER; note = cytidine-3'-phosphate
  modified_base 5: mod_base = OTHER; note = adenosine-3'-phosphate
  modified_base 6: mod_base = OTHER; note = guanosine-3'-phosphate
  modified_base 7: mod_base = OTHER; note = adenosine-3'-phosphate
  modified_base 8: mod_base = OTHER; note = uridine-3'-phosphate
  modified_base 9: mod_base = OTHER; note = adenosine-3'-phosphate
  modified_base 10: mod_base = OTHER; note = guanosine-3'-phosphate
  modified_base 11: mod_base = OTHER; note = guanosine-3'-phosphate
  modified_base 12: mod_base = OTHER; note = adenosine-3'-phosphate
  modified_base 13: mod_base = OTHER; note = adenosine-3'-phosphate
  modified_base 14: mod_base = OTHER; note = adenosine-3'-phosphate
  modified_base 15: mod_base = OTHER; note = uridine-3'-phosphate
  modified_base 16: mod_base = OTHER; note = uridine-3'-phosphate
  modified_base 17: mod_base = OTHER; note = cytidine-3'-phosphate
  modified_base 18: mod_base = OTHER; note = adenosine-3'-phosphate
  modified_base 19: mod_base = OTHER; note = adenosine-3'-phosphate
  misc_feature 1..19: note = RNA
  misc_feature 20..21: note = DNA
atacagataggaaattcaatt

SEQ ID NO: 702 - DNA, 21 bp, synthetic construct
  source 1..21: mol_type = other DNA
  modified_base 1: mod_base = OTHER; note = uridine-3'-phosphate
  modified_base 2: mod_base = OTHER; note = adenosine-3'-phosphate
  modified_base 3: mod_base = OTHER; note = guanosine-3'-phosphate
  modified_base 4: mod_base = OTHER; note = guanosine-3'-phosphate
  modified_base 5: mod_base = OTHER; note = cytidine-3'-phosphate
  modified_base 6: mod_base = OTHER; note = adenosine-3'-phosphate
  modified_base 7: mod_base = OTHER; note = guanosine-3'-phosphate
  modified_base 8: mod_base = OTHER; note = adenosine-3'-phosphate
  modified_base 9: mod_base = OTHER; note = cytidine-3'-phosphate
  modified_base 10: mod_base = OTHER; note = adenosine-3'-phosphate
  modified_base 11: mod_base = OTHER; note = uridine-3'-phosphate
  modified_base 12: mod_base = OTHER; note = adenosine-3'-phosphate
  modified_base 13: mod_base = OTHER; note = cytidine-3'-phosphate
  modified_base 14: mod_base = OTHER; note = adenosine-3'-phosphate
  modified_base 15: mod_base = OTHER; note = guanosine-3'-phosphate
  modified_base 16: mod_base = OTHER; note = adenosine-3'-phosphate
  modified_base 17: mod_base = OTHER; note = uridine-3'-phosphate
  modified_base 18: mod_base = OTHER; note = adenosine-3'-phosphate
  modified_base 19: mod_base = OTHER; note = guanosine-3'-phosphate
  misc_feature 1..19: note = RNA
  misc_feature 20..21: note = DNA
taggcagacatacagatagtt

SEQ ID NO: 703 - DNA, 21 bp, synthetic construct
  source 1..21: mol_type = other DNA
  modified_base 1: mod_base = OTHER; note = adenosine-3'-phosphate
  modified_base 2: mod_base = OTHER; note = uridine-3'-phosphate
  modified_base 3: mod_base = OTHER; note = adenosine-3'-phosphate
  modified_base 4: mod_base = OTHER; note = uridine-3'-phosphate
  modified_base 5: mod_base = OTHER; note = adenosine-3'-phosphate
  modified_base 6: mod_base = OTHER; note = uridine-3'-phosphate
  modified_base 7: mod_base = OTHER; note = uridine-3'-phosphate
  modified_base 8: mod_base = OTHER; note = uridine-3'-phosphate
  modified_base 9: mod_base = OTHER; note = uridine-3'-phosphate
  modified_base 10: mod_base = OTHER; note = uridine-3'-phosphate
  modified_base 11: mod_base = OTHER; note = uridine-3'-phosphate
  modified_base 12: mod_base = OTHER; note = uridine-3'-phosphate
  modified_base 13: mod_base = OTHER; note = adenosine-3'-phosphate
  modified_base 14: mod_base = OTHER; note = adenosine-3'-phosphate
  modified_base 15: mod_base = OTHER; note = uridine-3'-phosphate
  modified_base 16: mod_base = OTHER; note = uridine-3'-phosphate
  modified_base 17: mod_base = OTHER; note = adenosine-3'-phosphate
  modified_base 18: mod_base = OTHER; note = guanosine-3'-phosphate
  modified_base 19: mod_base = OTHER; note = guanosine-3'-phosphate
  misc_feature 1..19: note = RNA
  misc_feature 20..21: note = DNA
atatatttttttaattaggtt

SEQ ID NO: 704 - DNA, 21 bp, synthetic construct
  source 1..21: mol_type = other DNA
  modified_base 1: mod_base = OTHER; note = uridine-3'-phosphate
  modified_base 2: mod_base = OTHER; note = adenosine-3'-phosphate
  modified_base 3: mod_base = OTHER; note = guanosine-3'-phosphate
  modified_base 4: mod_base = OTHER; note = cytidine-3'-phosphate
  modified_base 5: mod_base = OTHER; note = adenosine-3'-phosphate
  modified_base 6: mod_base = OTHER; note = uridine-3'-phosphate
  modified_base 7: mod_base = OTHER; note = adenosine-3'-phosphate
  modified_base 8: mod_base = OTHER; note = adenosine-3'-phosphate
  modified_base 9: mod_base = OTHER; note = uridine-3'-phosphate
  modified_base 10: mod_base = OTHER; note = adenosine-3'-phosphate
  modified_base 11: mod_base = OTHER; note = cytidine-3'-phosphate
  modified_base 12: mod_base = OTHER; note = adenosine-3'-phosphate
  modified_base 13: mod_base = OTHER; note = adenosine-3'-phosphate
  modified_base 14: mod_base = OTHER; note = uridine-3'-phosphate
  modified_base 15: mod_base = OTHER; note = adenosine-3'-phosphate
  modified_base 16: mod_base = OTHER; note = uridine-3'-phosphate
  modified_base 17: mod_base = OTHER; note = adenosine-3'-phosphate
  modified_base 18: mod_base = OTHER; note = uridine-3'-phosphate
  modified_base 19: mod_base = OTHER; note = adenosine-3'-phosphate
  misc_feature 1..19: note = RNA
  misc_feature 20..21: note = DNA
tagcataatacaatatatatt

SEQ ID NO: 705 - RNA, 19 nt, synthetic construct
  source 1..19: mol_type = other RNA
aatatcagacgctaggggg

SEQ ID NO: 706 - RNA, 19 nt, synthetic construct
  source 1..19: mol_type = other RNA
gggggacagccactgtgtt

SEQ ID NO: 707 - RNA, 19 nt, synthetic construct
  source 1..19: mol_type = other RNA
ttgtctgctaccctcatcc

SEQ ID NO: 708 - RNA, 19 nt, synthetic construct
  source 1..19: mol_type = other RNA
catcctggtcactgcttct

SEQ ID NO: 709 - RNA, 19 nt, synthetic construct
  source 1..19: mol_type = other RNA
ttctgctataacagcccta

SEQ ID NO: 710 - RNA, 19 nt, synthetic construct
  source 1..19: mol_type = other RNA
ccctaggccaggaatatga

SEQ ID NO: 711 - RNA, 19 nt, synthetic construct
  source 1..19: mol_type = other RNA
caggaatatgaacaagccg

SEQ ID NO: 712 - RNA, 19 nt, synthetic construct
  source 1..19: mol_type = other RNA
agccgctgctttggatctc

SEQ ID NO: 713 - RNA, 19 nt, synthetic construct
  source 1..19: mol_type = other RNA
atctctgtcctcaccagcc

SEQ ID NO: 714 - RNA, 19 nt, synthetic construct
  source 1..19: mol_type = other RNA
cagcctcctggaagccttt

SEQ ID NO: 715 - RNA, 19 nt, synthetic construct
  source 1..19: mol_type = other RNA
tttgctcacacagacctca

SEQ ID NO: 716 - RNA, 19 nt, synthetic construct
  source 1..19: mol_type = other RNA
cctcagtgggaaggtgttt

SEQ ID NO: 717 - RNA, 19 nt, synthetic construct
  source 1..19: mol_type = other RNA
ggaaggtgtttgtatttcc

SEQ ID NO: 718 - RNA, 19 nt, synthetic construct
  source 1..19: mol_type = other RNA
ttcctagagaatctgttac

SEQ ID NO: 719 - RNA, 19 nt, synthetic construct
  source 1..19: mol_type = other RNA
ttactgatcatgtaaactt

SEQ ID NO: 720 - RNA, 19 nt, synthetic construct
  source 1..19: mol_type = other RNA
aacttgatcacaccgctgg

SEQ ID NO: 721 - RNA, 19 nt, synthetic construct
  source 1..19: mol_type = other RNA
gctggagaagcctctacag

SEQ ID NO: 722 - RNA, 19 nt, synthetic construct
  source 1..19: mol_type = other RNA
tacagaactttaccttgtg

SEQ ID NO: 723 - RNA, 19 nt, synthetic construct
  source 1..19: mol_type = other RNA
actttaccttgtgttttcg

SEQ ID NO: 724 - RNA, 19 nt, synthetic construct
  source 1..19: mol_type = other RNA
ttcgagcctatagtgatct

SEQ ID NO: 725 - RNA, 19 nt, synthetic construct
  source 1..19: mol_type = other RNA
gatctctctcgtgcctaca

SEQ ID NO: 726 - RNA, 19 nt, synthetic construct
  source 1..19: mol_type = other RNA
tctcgtgcctacagcctct

SEQ ID NO: 727 - RNA, 19 nt, synthetic construct
  source 1..19: mol_type = other RNA
cagcctcttctcctacaat

SEQ ID NO: 728 - RNA, 19 nt, synthetic construct
  source 1..19: mol_type = other RNA
caatacccaaggcagggat

SEQ ID NO: 729 - RNA, 19 nt, synthetic construct
  source 1..19: mol_type = other RNA
gggataatgagctactagt

SEQ ID NO: 730 - RNA, 19 nt, synthetic construct
  source 1..19: mol_type = other RNA
tagtttataaagaaagagt

SEQ ID NO: 731 - RNA, 19 nt, synthetic construct
  source 1..19: mol_type = other RNA
agagttggagagtatagtc

SEQ ID NO: 732 - RNA, 19 nt, synthetic construct
  source 1..19: mol_type = other RNA
tagtctatacattggaaga

SEQ ID NO: 733 - RNA, 19 nt, synthetic construct
  source 1..19: mol_type = other RNA
ttggaagacacaaagttac

SEQ ID NO: 734 - RNA, 19 nt, synthetic construct
  source 1..19: mol_type = other RNA
cacaaagttacatccaaag

SEQ ID NO: 735 - RNA, 19 nt, synthetic construct
  source 1..19: mol_type = other RNA
aaagttatcgaaaagttcc

SEQ ID NO: 736 - RNA, 19 nt, synthetic construct
  source 1..19: mol_type = other RNA
gttcccggctccagtgcac

SEQ ID NO: 737 - RNA, 19 nt, synthetic construct
  source 1..19: mol_type = other RNA
tgcacatctgtgtgagctg

SEQ ID NO: 738 - RNA, 19 nt, synthetic construct
  source 1..19: mol_type = other RNA
agctgggagtcctcatcag

SEQ ID NO: 739 - RNA, 19 nt, synthetic construct
  source 1..19: mol_type = other RNA
gtattgctgaattttggat

SEQ ID NO: 740 - RNA, 19 nt, synthetic construct
  source 1..19: mol_type = other RNA
ggatcaatgggacaccttt

SEQ ID NO: 741 - RNA, 19 nt, synthetic construct
  source 1..19: mol_type = other RNA
ctttggtgaaaaagggtct

SEQ ID NO: 742 - RNA, 19 nt, synthetic construct
  source 1..19: mol_type = other RNA
ggtctgcgacagggttact

SEQ ID NO: 743 - RNA, 19 nt, synthetic construct
  source 1..19: mol_type = other RNA
tttgtagaagctcagccca

SEQ ID NO: 744 - RNA, 19 nt, synthetic construct
  source 1..19: mol_type = other RNA
gcccaagattgtcctgggg

SEQ ID NO: 745 - RNA, 19 nt, synthetic construct
  source 1..19: mol_type = other RNA
tggggcaggaacaggattc

SEQ ID NO: 746 - RNA, 19 nt, synthetic construct
  source 1..19: mol_type = other RNA
tcctatgggggcaagtttg

SEQ ID NO: 747 - RNA, 19 nt, synthetic construct
  source 1..19: mol_type = other RNA
tttgataggagccagtcct

SEQ ID NO: 748 - RNA, 19 nt, synthetic construct
  source 1..19: mol_type = other RNA
gtcctttgtgggagagatt

SEQ ID NO: 749 - RNA, 19 nt, synthetic construct
  source 1..19: mol_type = other RNA
agattggggatttgtacat

SEQ ID NO: 750 - RNA, 19 nt, synthetic construct
  source 1..19: mol_type = other RNA
tttgtacatgtgggactct

SEQ ID NO: 751 - RNA, 19 nt, synthetic construct
  source 1..19: mol_type = other RNA
atgtgggactctgtgctgc

SEQ ID NO: 752 - RNA, 19 nt, synthetic construct
  source 1..19: mol_type = other RNA
ctgcccccagaaaatatcc

SEQ ID NO: 753 - RNA, 19 nt, synthetic construct
  source 1..19: mol_type = other RNA
tatcctgtctgcctatcag

SEQ ID NO: 754 - RNA, 19 nt, synthetic construct
  source 1..19: mol_type = other RNA
cctatcagggtacccctct

SEQ ID NO: 755 - RNA, 19 nt, synthetic construct
  source 1..19: mol_type = other RNA
ctctccctgccaatatcct

SEQ ID NO: 756 - RNA, 19 nt, synthetic construct
  source 1..19: mol_type = other RNA
tcctggactggcaggctct

SEQ ID NO: 757 - RNA, 19 nt, synthetic construct
  source 1..19: mol_type = other RNA
tggcaggctctgaactatg

SEQ ID NO: 758 - RNA, 19 nt, synthetic construct
  source 1..19: mol_type = other RNA
tatgaaatcagaggatatg

SEQ ID NO: 759 - RNA, 19 nt, synthetic construct
  source 1..19: mol_type = other RNA
tatgtcatcatcaaaccct

SEQ ID NO: 760 - RNA, 19 nt, synthetic construct
  source 1..19: mol_type = other RNA
acccttggtgtgggtctga

SEQ ID NO: 761 - RNA, 19 nt, synthetic construct
  source 1..19: mol_type = other RNA
tgtgggtctgaggtcttga

SEQ ID NO: 762 - RNA, 19 nt, synthetic construct
  source 1..19: mol_type = other RNA
ttgactcaacgagagcact

SEQ ID NO: 763 - RNA, 19 nt, synthetic construct
  source 1..19: mol_type = other RNA
gcacttgaaaatgaaatga

SEQ ID NO: 764 - RNA, 19 nt, synthetic construct
  source 1..19: mol_type = other RNA
aatgactgtctaagagatc

SEQ ID NO: 765 - RNA, 19 nt, synthetic construct
  source 1..19: mol_type = other RNA
agatctggtcaaagcaact

SEQ ID NO: 766 - RNA, 19 nt, synthetic construct
  source 1..19: mol_type = other RNA
caaagcaactggatactag

SEQ ID NO: 767 - RNA, 19 nt, synthetic construct
  source 1..19: mol_type = other RNA
ctagatcttacatctgcag

SEQ ID NO: 768 - RNA, 19 nt, synthetic construct
  source 1..19: mol_type = other RNA
gcagctctttcttctttga

SEQ ID NO: 769 - RNA, 19 nt, synthetic construct
  source 1..19: mol_type = other RNA
ttgaatttcctatctgtat

SEQ ID NO: 770 - RNA, 19 nt, synthetic construct
  source 1..19: mol_type = other RNA
ctatctgtatgtctgccta

SEQ ID NO: 771 - RNA, 19 nt, synthetic construct
  source 1..19: mol_type = other RNA
cctaattaaaaaaatatat

SEQ ID NO: 772 - RNA, 19 nt, synthetic construct
  source 1..19: mol_type = other RNA
tatatattgtattatgcta

SEQ ID NO: 773 - RNA, 21 nt, synthetic construct
  source 1..21: mol_type = other RNA
caatgagctactaatttataa

SEQ ID NO: 774 - RNA, 23 nt, synthetic construct
  source 1..23: mol_type = other RNA
ttataaattagtagctcattgtc

SEQ ID NO: 775 - RNA, 21 nt, synthetic construct
  source 1..21: mol_type = other RNA
attttacactgtgtttccgaa

SEQ ID NO: 776 - RNA, 23 nt, synthetic construct
  source 1..23: mol_type = other RNA
ttcggaaacacagtgtaaaattc

SEQ ID NO: 777 - RNA, 21 nt, synthetic construct
  source 1..21: mol_type = other RNA
acaatgagctactaatttata

SEQ ID NO: 778 - RNA, 23 nt, synthetic construct
  source 1..23: mol_type = other RNA
tataaattagtagctcattgtct

SEQ ID NO: 779 - RNA, 21 nt, synthetic construct
  source 1..21: mol_type = other RNA
gcagaattttacactgtgtta

SEQ ID NO: 780 - RNA, 23 nt, synthetic construct
  source 1..23: mol_type = other RNA
taacacagtgtaaaattctgcag

SEQ ID NO: 781 - RNA, 21 nt, synthetic construct
  source 1..21: mol_type = other RNA
gaattttacactgtgtttcca

SEQ ID NO: 782 - RNA, 23 nt, synthetic construct
  source 1..23: mol_type = other RNA
tggaaacacagtgtaaaattctg

SEQ ID NO: 783 - RNA, 21 nt, synthetic construct
  source 1..21: mol_type = other RNA
cagaattttacactgtgttta

SEQ ID NO: 784 - RNA, 23 nt, synthetic construct
  source 1..23: mol_type = other RNA
taaacacagtgtaaaattctgca

SEQ ID NO: 785 - RNA, 21 nt, synthetic construct
  source 1..21: mol_type = other RNA
ctcagagtcttttctcctaca

SEQ ID NO: 786 - RNA, 23 nt, synthetic construct
  source 1..23: mol_type = other RNA
tgtaggagaaaagactctgagag

SEQ ID NO: 787 - RNA, 21 nt, synthetic construct
  source 1..21: mol_type = other RNA
gacaatgagctactaatttaa

SEQ ID NO: 788 - RNA, 23 nt, synthetic construct
  source 1..23: mol_type = other RNA
ttaaattagtagctcattgtctc

SEQ ID NO: 789 - RNA, 21 nt, synthetic construct
  source 1..21: mol_type = other RNA
agacaatgagctactaattta

SEQ ID NO: 790 - RNA, 23 nt, synthetic construct
  source 1..23: mol_type = other RNA
taaattagtagctcattgtctct

SEQ ID NO: 791 - RNA, 21 nt, synthetic construct
  source 1..21: mol_type = other RNA
atggaaagccttgggtaaaaa

SEQ ID NO: 792 - RNA, 23 nt, synthetic construct
  source 1..23: mol_type = other RNA
tttttacccaaggctttccattg

SEQ ID NO: 793 - RNA, 21 nt, synthetic construct
  source 1..21: mol_type = other RNA
cccgctctcagagtcttttca

SEQ ID NO: 794 - RNA, 23 nt, synthetic construct
  source 1..23: mol_type = other RNA
tgaaaagactctgagagcgggaa

SEQ ID NO: 795 - RNA, 21 nt, synthetic construct
  source 1..21: mol_type = other RNA
tcagagtcttttctcctacaa

SEQ ID NO: 796 - RNA, 23 nt, synthetic construct
  source 1..23: mol_type = other RNA
ttgtaggagaaaagactctgaga

SEQ ID NO: 797 - RNA, 21 nt, synthetic construct
  source 1..21: mol_type = other RNA
gagacaatgagctactaatta

SEQ ID NO: 798 - RNA, 23 nt, synthetic construct
  source 1..23: mol_type = other RNA
taattagtagctcattgtctctg

SEQ ID NO: 799 - RNA, 21 nt, synthetic construct
  source 1..21: mol_type = other RNA
ttcaccagccttctttcagaa

SEQ ID NO: 800 - RNA, 23 nt, synthetic construct
  source 1..23: mol_type = other RNA
ttctgaaagaaggctggtgaaga

SEQ ID NO: 801 - RNA, 21 nt, synthetic construct
  source 1..21: mol_type = other RNA
tcttttctcctacagtgtcaa

SEQ ID NO: 802 - RNA, 23 nt, synthetic construct
  source 1..23: mol_type = other RNA
ttgacactgtaggagaaaagact

SEQ ID NO: 803 - RNA, 21 nt, synthetic construct
  source 1..21: mol_type = other RNA
agtgacctttcccgctctcaa

SEQ ID NO: 804 - RNA, 23 nt, synthetic construct
  source 1..23: mol_type = other RNA
ttgagagcgggaaaggtcactgt

SEQ ID NO: 805 - RNA, 21 nt, synthetic construct
  source 1..21: mol_type = other RNA
agagtcttttctcctacagta

SEQ ID NO: 806 - RNA, 23 nt, synthetic construct
  source 1..23: mol_type = other RNA
tactgtaggagaaaagactctga

SEQ ID NO: 807 - RNA, 21 nt, synthetic construct
  source 1..21: mol_type = other RNA
ctctgcagaattttacactga

SEQ ID NO: 808 - RNA, 23 nt, synthetic construct
  source 1..23: mol_type = other RNA
tcagtgtaaaattctgcagaggt

SEQ ID NO: 809 - RNA, 21 nt, synthetic construct
  source 1..21: mol_type = other RNA
tgtcttcaccagccttcttta

SEQ ID NO: 810 - RNA, 23 nt, synthetic construct
  source 1..23: mol_type = other RNA
taaagaaggctggtgaagacaaa

SEQ ID NO: 811 - RNA, 21 nt, synthetic construct
  source 1..21: mol_type = other RNA
agccttctttcagaagcctta

SEQ ID NO: 812 - RNA, 23 nt, synthetic construct
  source 1..23: mol_type = other RNA
taaggcttctgaaagaaggctgg

SEQ ID NO: 813 - RNA, 21 nt, synthetic construct
  source 1..21: mol_type = other RNA
aatggaaagccttgggtaaaa

SEQ ID NO: 814 - RNA, 23 nt, synthetic construct
  source 1..23: mol_type = other RNA
ttttacccaaggctttccattga

SEQ ID NO: 815 - RNA, 21 nt, synthetic construct
  source 1..21: mol_type = other RNA
cgctctcagagtcttttctca

SEQ ID NO: 816 - RNA, 23 nt, synthetic construct
  source 1..23: mol_type = other RNA
tgagaaaagactctgagagcggg

SEQ ID NO: 817 - RNA, 21 nt, synthetic construct
  source 1..21: mol_type = other RNA
caatggaaagccttgggtaaa

SEQ ID NO: 818 - RNA, 23 nt, synthetic construct
  source 1..23: mol_type = other RNA
tttacccaaggctttccattgac

SEQ ID NO: 819 - RNA, 21 nt, synthetic construct
  source 1..21: mol_type = other RNA
tcttcaccagccttctttcaa

SEQ ID NO: 820 - RNA, 23 nt, synthetic construct
  source 1..23: mol_type = other RNA
ttgaaagaaggctggtgaagaca

SEQ ID NO: 821 - RNA, 21 nt, synthetic construct
  source 1..21: mol_type = other RNA
ctctcagagtcttttctccta

SEQ ID NO: 822 - RNA, 23 nt, synthetic construct
  source 1..23: mol_type = other RNA
taggagaaaagactctgagagcg

SEQ ID NO: 823 - RNA, 21 nt, synthetic construct
  source 1..21: mol_type = other RNA
cagagacaatgagctactaaa

SEQ ID NO: 824 - RNA, 23 nt, synthetic construct
  source 1..23: mol_type = other RNA
tttagtagctcattgtctctgcc

SEQ ID NO: 825 - RNA, 21 nt, synthetic construct
  source 1..21: mol_type = other RNA
agagacaatgagctactaata

SEQ ID NO: 826 - RNA, 23 nt, synthetic construct
  source 1..23: mol_type = other RNA
tattagtagctcattgtctctgc

SEQ ID NO: 827 - RNA, 21 nt, synthetic construct
  source 1..21: mol_type = other RNA
cagagtcttttctcctacaga

SEQ ID NO: 828 - RNA, 23 nt, synthetic construct
  source 1..23: mol_type = other RNA
tctgtaggagaaaagactctgag

SEQ ID NO: 829 - RNA, 21 nt, synthetic construct
  source 1..21: mol_type = other RNA
tctcagagtcttttctcctaa

SEQ ID NO: 830 - RNA, 23 nt, synthetic construct
  source 1..23: mol_type = other RNA
ttaggagaaaagactctgagagc

SEQ ID NO: 831 - RNA, 21 nt, synthetic construct
  source 1..21: mol_type = other RNA
cctacagtgacctttcccgca

SEQ ID NO: 832 - RNA, 23 nt, synthetic construct
  source 1..23: mol_type = other RNA
tgcgggaaaggtcactgtaggtt

SEQ ID NO: 833 - RNA, 21 nt, synthetic construct
  source 1..21: mol_type = other RNA
gccttctttcagaagccttta

SEQ ID NO: 834 - RNA, 23 nt, synthetic construct
  source 1..23: mol_type = other RNA
taaaggcttctgaaagaaggctg

SEQ ID NO: 835 - RNA, 21 nt, synthetic construct
  source 1..21: mol_type = other RNA
tcccgctctcagagtctttta

SEQ ID NO: 836 - RNA, 23 nt, synthetic construct
  source 1..23: mol_type = other RNA
taaaagactctgagagcgggaaa

SEQ ID NO: 837 - RNA, 21 nt, synthetic construct
  source 1..21: mol_type = other RNA
gtcttttctcctacagtgtca

SEQ ID NO: 838 - RNA, 23 nt, synthetic construct
  source 1..23: mol_type = other RNA
tgacactgtaggagaaaagactc

SEQ ID NO: 839 - RNA, 21 nt, synthetic construct
  source 1..21: mol_type = other RNA
ctacagtgacctttcccgcta

SEQ ID NO: 840 - RNA, 23 nt, synthetic construct
  source 1..23: mol_type = other RNA
tagcgggaaaggtcactgtaggt

SEQ ID NO: 841 - RNA, 21 nt, synthetic construct
  source 1..21: mol_type = other RNA
agtcttttctcctacagtgta

SEQ ID NO: 842 - RNA, 23 nt, synthetic construct
  source 1..23: mol_type = other RNA
tacactgtaggagaaaagactct

SEQ ID NO: 843 - RNA, 21 nt, synthetic construct
  source 1..21: mol_type = other RNA
acagtgacctttcccgctcta

SEQ ID NO: 844 - RNA, 23 nt, synthetic construct
  source 1..23: mol_type = other RNA
tagagcgggaaaggtcactgtag

SEQ ID NO: 845 - RNA, 21 nt, synthetic construct
  source 1..21: mol_type = other RNA
caccagccttctttcagaaga

SEQ ID NO: 846 - RNA, 23 nt, synthetic construct
  source 1..23: mol_type = other RNA
tcttctgaaagaaggctggtgaa

SEQ ID NO: 847 - RNA, 21 nt, synthetic construct
  source 1..21: mol_type = other RNA
gaattttgggtcaatggaaaa

SEQ ID NO: 848 - RNA, 23 nt, synthetic construct
  source 1..23: mol_type = other RNA
ttttccattgacccaaaattcaa

SEQ ID NO: 849 - RNA, 21 nt, synthetic construct
  source 1..21: mol_type = other RNA
tcaccagccttctttcagaaa

SEQ ID NO: 850 - RNA, 23 nt, synthetic construct
  source 1..23: mol_type = other RNA
tttctgaaagaaggctggtgaag

SEQ ID NO: 851 - RNA, 21 nt, synthetic construct
  source 1..21: mol_type = other RNA
cttttctcctacagtgtcaaa

SEQ ID NO: 852 - RNA, 23 nt, synthetic construct
  source 1..23: mol_type = other RNA
tttgacactgtaggagaaaagac

SEQ ID NO: 853 - RNA, 21 nt, synthetic construct
  source 1..21: mol_type = other RNA
acctacagtgacctttcccga

SEQ ID NO: 854 - RNA, 23 nt, synthetic construct
  source 1..23: mol_type = other RNA
tcgggaaaggtcactgtaggttc

SEQ ID NO: 855 - RNA, 21 nt, synthetic construct
  source 1..21: mol_type = other RNA
tcaaaagtcacagtccgtgga

SEQ ID NO: 856 - RNA, 23 nt, synthetic construct
  source 1..23: mol_type = other RNA
tccacggactgtgacttttgatt

SEQ ID NO: 857 - RNA, 21 nt, synthetic construct
  source 1..21: mol_type = other RNA
tttcccgctctcagagtctta

SEQ ID NO: 858 - RNA, 23 nt, synthetic construct
  source 1..23: mol_type = other RNA
taagactctgagagcgggaaagg

SEQ ID NO: 859 - RNA, 21 nt, synthetic construct
  source 1..21: mol_type = other RNA
cagtgacctttcccgctctca

SEQ ID NO: 860 - RNA, 23 nt, synthetic construct
  source 1..23: mol_type = other RNA
tgagagcgggaaaggtcactgta

SEQ ID NO: 861 - RNA, 21 nt, synthetic construct
  source 1..21: mol_type = other RNA
caaaagtcacagtccgtggta

SEQ ID NO: 862 - RNA, 23 nt, synthetic construct
  source 1..23: mol_type = other RNA
taccacggactgtgacttttgat

SEQ ID NO: 863 - RNA, 21 nt, synthetic construct
  source 1..21: mol_type = other RNA
ttcccgctctcagagtcttta

SEQ ID NO: 864 - RNA, 23 nt, synthetic construct
  source 1..23: mol_type = other RNA
taaagactctgagagcgggaaag

SEQ ID NO: 865 - RNA, 21 nt, synthetic construct
  source 1..21: mol_type = other RNA
aatcaaaagtcacagtccgta

SEQ ID NO: 866 - RNA, 23 nt, synthetic construct
  source 1..23: mol_type = other RNA
tacggactgtgacttttgattgt

SEQ ID NO: 867 - RNA, 21 nt, synthetic construct
  source 1..21: mol_type = other RNA
  modified_base 1: mod_base = OTHER; note = 2'-O-methylcytidine-3'-phosphorothioate
  modified_base 2: mod_base = OTHER; note = 2'-O-methyladenosine-3'-phosphorothioate
  modified_base 3: mod_base = OTHER; note = 2'-O-methyladenosine-3'-phosphate
  modified_base 4: mod_base = OTHER; note = 2'-O-methyluridine-3'-phosphate
  modified_base 5: mod_base = OTHER; note = 2'-O-methylguanosine-3'-phosphate
  modified_base 6: mod_base = OTHER; note = 2'-O-methyladenosine-3'-phosphate
  modified_base 7: mod_base = OTHER; note = 2'-deoxy-2'-fluoroguanosine-3'-phosphate
  modified_base 8: mod_base = OTHER; note = 2'-O-methylcytidine-3'-phosphate
  modified_base 9: mod_base = OTHER; note = 2'-deoxy-2'-fluorouridine-3'-phosphate
  modified_base 10: mod_base = OTHER; note = 2'-deoxy-2'-fluoroadenosine-3'-phosphate
  modified_base 11: mod_base = OTHER; note = 2'-deoxy-2'-fluorocytidine-3'-phosphate
  modified_base 12: mod_base = OTHER; note = 2'-O-methyluridine-3'-phosphate
  modified_base 13: mod_base = OTHER; note = 2'-O-methyladenosine-3'-phosphate
  modified_base 14: mod_base = OTHER; note = 2'-O-methyladenosine-3'-phosphate
  modified_base 15: mod_base = OTHER; note = 2'-O-methyluridine-3'-phosphate
  modified_base 16: mod_base = OTHER; note = 2'-O-methyluridine-3'-phosphate
  modified_base 17: mod_base = OTHER; note = 2'-O-methyluridine-3'-phosphate
  modified_base 18: mod_base = OTHER; note = 2'-O-methyladenosine-3'-phosphate
  modified_base 19: mod_base = OTHER; note = 2'-O-methyluridine-3'-phosphate
  modified_base 20: mod_base = OTHER; note = 2'-O-methyladenosine-3'-phosphate
  modified_base 21: mod_base = OTHER; note = 2'-O-methyladenosine-3'-phosphate ((2S,4R)-1-[29-[[2-(acetylamino)-2-deoxy-beta-D-galactopyra nosyl]oxy]-14,14-bis[[3-[[3-[[5-[[2-(acetylamino)-2-deoxy-b eta-D-galactopyranosyl]oxy]-1-oxopentyl]amino]propyl]amino] -3-oxopropoxy]methyl]-1,12,19,25-tetraoxo-16-oxa-13,20,24-t riazanonacos-1-yl]-4-hydroxy-2-pyrrolidinyl)methyl ester
caatgagctactaatttataa

SEQ ID NO: 868 - RNA, 23 nt, synthetic construct
  source 1..23: mol_type = other RNA
  modified_base 1: mod_base = OTHER; note = 2'-O-methyluridine-3'-phosphorothioate 5'-(E)-Vinylphosphonate
  modified_base 2: mod_base = OTHER; note = 2'-deoxy-2'-fluorouridine-3'-phosphorothioate
  modified_base 3: mod_base = OTHER; note = 2'-O-methyladenosine-3'-phosphate
  modified_base 4: mod_base = OTHER; note = 2'-O-methyluridine-3'-phosphate
  modified_base 5: mod_base = OTHER; note = 2'-O-methyladenosine-3'-phosphate
  modified_base 6: mod_base = OTHER; note = 2'-deoxy-2'-fluoroadenosine-3'-phosphate
  modified_base 7: mod_base = OTHER; note = 2'-O-methyladenosine-3'-phosphate
  modified_base 8: mod_base = OTHER; note = 2'-deoxy-2'-fluorouridine-3'-phosphate
  modified_base 9: mod_base = OTHER; note = 2'-deoxy-2'-fluorouridine-3'-phosphate
  modified_base 10: mod_base = OTHER; note = 2'-O-methyladenosine-3'-phosphate
  modified_base 11: mod_base = OTHER; note = 2'-O-methylguanosine-3'-phosphate
  modified_base 12: mod_base = OTHER; note = 2'-O-methyluridine-3'-phosphate
  modified_base 13: mod_base = OTHER; note = 2'-O-methyladenosine-3'-phosphate
  modified_base 14: mod_base = OTHER; note = 2'-deoxy-2'-fluoroguanosine-3'-phosphate
  modified_base 15: mod_base = OTHER; note = 2'-O-methylcytidine-3'-phosphate
  modified_base 16: mod_base = OTHER; note = 2'-deoxy-2'-fluorouridine-3'-phosphate
  modified_base 17: mod_base = OTHER; note = 2'-O-methylcytidine-3'-phosphate
  modified_base 18: mod_base = OTHER; note = 2'-O-methyladenosine-3'-phosphate
  modified_base 19: mod_base = OTHER; note = 2'-O-methyluridine-3'-phosphate
  modified_base 20: mod_base = OTHER; note = 2'-O-methyluridine-3'-phosphate
  modified_base 21: mod_base = OTHER; note = 2'-O-methylguanosine-3'-phosphorothioate
  modified_base 22: mod_base = OTHER; note = 2'-O-methyluridine-3'-phosphorothioate
  modified_base 23: mod_base = OTHER; note = 2'-O-methylcytidine
ttataaattagtagctcattgtc

SEQ ID NO: 869 - RNA, 21 nt, synthetic construct
  source 1..21: mol_type = other RNA
  modified_base 1: mod_base = OTHER; note = 2'-O-methyladenosine-3'-phosphorothioate
  modified_base 2: mod_base = OTHER; note = 2'-O-methyluridine-3'-phosphorothioate
  modified_base 3: mod_base = OTHER; note = 2'-O-methyluridine-3'-phosphate
  modified_base 4: mod_base = OTHER; note = 2'-O-methyluridine-3'-phosphate
  modified_base 5: mod_base = OTHER; note = 2'-O-methyluridine-3'-phosphate
  modified_base 6: mod_base = OTHER; note = 2'-O-methyladenosine-3'-phosphate
  modified_base 7: mod_base = OTHER; note = 2'-deoxy-2'-fluorocytidine-3'-phosphate
  modified_base 8: mod_base = OTHER; note = 2'-O-methyladenosine-3'-phosphate
  modified_base 9: mod_base = OTHER; note = 2'-deoxy-2'-fluorocytidine-3'-phosphate
  modified_base 10: mod_base = OTHER; note = 2'-deoxy-2'-fluorouridine-3'-phosphate
  modified_base 11: mod_base = OTHER; note = 2'-deoxy-2'-fluoroguanosine-3'-phosphate
  modified_base 12: mod_base = OTHER; note = 2'-O-methyluridine-3'-phosphate
  modified_base 13: mod_base = OTHER; note = 2'-O-methylguanosine-3'-phosphate
  modified_base 14: mod_base = OTHER; note = 2'-O-methyluridine-3'-phosphate
  modified_base 15: mod_base = OTHER; note = 2'-O-methyluridine-3'-phosphate
  modified_base 16: mod_base = OTHER; note = 2'-O-methyluridine-3'-phosphate
  modified_base 17: mod_base = OTHER; note = 2'-O-methylcytidine-3'-phosphate
  modified_base 18: mod_base = OTHER; note = 2'-O-methylcytidine-3'-phosphate
  modified_base 19: mod_base = OTHER; note = 2'-O-methylguanosine-3'-phosphate
  modified_base 20: mod_base = OTHER; note = 2'-O-methyladenosine-3'-phosphate
  modified_base 21: mod_base = OTHER; note = 2'-O-methyladenosine-3'-phosphate ((2S,4R)-1-[29-[[2-(acetylamino)-2-deoxy-beta-D-galactopyra nosyl]oxy]-14,14-bis[[3-[[3-[[5-[[2-(acetylamino)-2-deoxy-b eta-D-galactopyranosyl]oxy]-1-oxopentyl]amino]propyl]amino] -3-oxopropoxy]methyl]-1,12,19,25-tetraoxo-16-oxa-13,20,24-t riazanonacos-1-yl]-4-hydroxy-2-pyrrolidinyl)methyl ester
attttacactgtgtttccgaa

SEQ ID NO: 870 - RNA, 23 nt, synthetic construct
  source 1..23: mol_type = other RNA
  modified_base 1: mod_base = OTHER; note = 2'-O-methyluridine-3'-phosphorothioate 5'-(E)-Vinylphosphonate
  modified_base 2: mod_base = OTHER; note = 2'-deoxy-2'-fluorouridine-3'-phosphorothioate
  modified_base 3: mod_base = OTHER; note = 2'-O-methylcytidine-3'-phosphate
  modified_base 4: mod_base = OTHER; note = 2'-O-methylguanosine-3'-phosphate
  modified_base 5: mod_base = OTHER; note = 2'-O-methylguanosine-3'-phosphate
  modified_base 6: mod_base = OTHER; note = 2'-deoxy-2'-fluoroadenosine-3'-phosphate
  modified_base 7: mod_base = OTHER; note = 2'-O-methyladenosine-3'-phosphate
  modified_base 8: mod_base = OTHER; note = 2'-deoxy-2'-fluoroadenosine-3'-phosphate
  modified_base 9: mod_base = OTHER; note = 2'-deoxy-2'-fluorocytidine-3'-phosphate
  modified_base 10: mod_base = OTHER; note = 2'-O-methyladenosine-3'-phosphate
  modified_base 11: mod_base = OTHER; note = 2'-O-methylcytidine-3'-phosphate
  modified_base 12: mod_base = OTHER; note = 2'-O-methyladenosine-3'-phosphate
  modified_base 13: mod_base = OTHER; note = 2'-O-methylguanosine-3'-phosphate
  modified_base 14: mod_base = OTHER; note = 2'-deoxy-2'-fluorouridine-3'-phosphate
  modified_base 15: mod_base = OTHER; note = 2'-O-methylguanosine-3'-phosphate
  modified_base 16: mod_base = OTHER; note = 2'-deoxy-2'-fluorouridine-3'-phosphate
  modified_base 17: mod_base = OTHER; note = 2'-O-methyladenosine-3'-phosphate
  modified_base 18: mod_base = OTHER; note = 2'-O-methyladenosine-3'-phosphate
  modified_base 19: mod_base = OTHER; note = 2'-O-methyladenosine-3'-phosphate
  modified_base 20: mod_base = OTHER; note = 2'-O-methyladenosine-3'-phosphate
  modified_base 21: mod_base = OTHER; note = 2'-O-methyluridine-3'-phosphorothioate
  modified_base 22: mod_base = OTHER; note = 2'-O-methyluridine-3'-phosphorothioate
  modified_base 23: mod_base = OTHER; note = 2'-O-methylcytidine
ttcggaaacacagtgtaaaattc

SEQ ID NO: 871 - RNA, 21 nt, synthetic construct
  source 1..21: mol_type = other RNA
  modified_base 1: mod_base = OTHER; note = 2'-O-methyladenosine-3'-phosphorothioate
  modified_base 2: mod_base = OTHER; note = 2'-O-methylcytidine-3'-phosphorothioate
  modified_base 3: mod_base = OTHER; note = 2'-O-methyladenosine-3'-phosphate
  modified_base 4: mod_base = OTHER; note = 2'-O-methyladenosine-3'-phosphate
  modified_base 5: mod_base = OTHER; note = 2'-O-methyluridine-3'-phosphate
  modified_base 6: mod_base = OTHER; note = 2'-O-methylguanosine-3'-phosphate
  modified_base 7: mod_base = OTHER; note = 2'-deoxy-2'-fluoroadenosine-3'-phosphate
  modified_base 8: mod_base = OTHER; note = 2'-O-methylguanosine-3'-phosphate
  modified_base 9: mod_base = OTHER; note = 2'-deoxy-2'-fluorocytidine-3'-phosphate
  modified_base 10: mod_base = OTHER; note = 2'-deoxy-2'-fluorouridine-3'-phosphate
  modified_base 11: mod_base = OTHER; note = 2'-deoxy-2'-fluoroadenosine-3'-phosphate
  modified_base 12: mod_base = OTHER; note = 2'-O-methylcytidine-3'-phosphate
  modified_base 13: mod_base = OTHER; note = 2'-O-methyluridine-3'-phosphate
  modified_base 14: mod_base = OTHER; note = 2'-O-methyladenosine-3'-phosphate
  modified_base 15: mod_base = OTHER; note = 2'-O-methyladenosine-3'-phosphate
  modified_base 16: mod_base = OTHER; note = 2'-O-methyluridine-3'-phosphate
  modified_base 17: mod_base = OTHER; note = 2'-O-methyluridine-3'-phosphate
  modified_base 18: mod_base = OTHER; note = 2'-O-methyluridine-3'-phosphate
  modified_base 19: mod_base = OTHER; note = 2'-O-methyladenosine-3'-phosphate
  modified_base 20: mod_base = OTHER; note = 2'-O-methyluridine-3'-phosphate
  modified_base 21: mod_base = OTHER; note = 2'-O-methyladenosine-3'-phosphate ((2S,4R)-1-[29-[[2-(acetylamino)-2-deoxy-beta-D-galactopyra nosyl]oxy]-14,14-bis[[3-[[3-[[5-[[2-(acetylamino)-2-deoxy-b eta-D-galactopyranosyl]oxy]-1-oxopentyl]amino]propyl]amino] -3-oxopropoxy]methyl]-1,12,19,25-tetraoxo-16-oxa-13,20,24-t riazanonacos-1-yl]-4-hydroxy-2-pyrrolidinyl)methyl ester
acaatgagctactaatttata

SEQ ID NO: 872 - RNA, 23 nt, synthetic construct
  source 1..23: mol_type = other RNA
  modified_base 1: mod_base = OTHER; note = 2'-O-methyluridine-3'-phosphorothioate 5'-(E)-Vinylphosphonate
  modified_base 2: mod_base = OTHER; note = 2'-deoxy-2'-fluoroadenosine-3'-phosphorothioate
  modified_base 3: mod_base = OTHER; note = 2'-O-methyluridine-3'-phosphate
  modified_base 4: mod_base = OTHER; note = 2'-O-methyladenosine-3'-phosphate
  modified_base 5: mod_base = OTHER; note = 2'-O-methyladenosine-3'-phosphate
  modified_base 6: mod_base = OTHER; note = 2'-deoxy-2'-fluoroadenosine-3'-phosphate
  modified_base 7: mod_base = OTHER; note = 2'-O-methyluridine-3'-phosphate
  modified_base 8: mod_base = OTHER; note = 2'-deoxy-2'-fluorouridine-3'-phosphate
  modified_base 9: mod_base = OTHER; note = 2'-deoxy-2'-fluoroadenosine-3'-phosphate
  modified_base 10: mod_base = OTHER; note = 2'-O-methylguanosine-3'-phosphate
  modified_base 11: mod_base = OTHER; note = 2'-O-methyluridine-3'-phosphate
  modified_base 12: mod_base = OTHER; note = 2'-O-methyladenosine-3'-phosphate
  modified_base 13: mod_base = OTHER; note = 2'-O-methylguanosine-3'-phosphate
  modified_base 14: mod_base = OTHER; note = 2'-deoxy-2'-fluorocytidine-3'-phosphate
  modified_base 15: mod_base = OTHER; note = 2'-O-methyluridine-3'-phosphate
  modified_base 16: mod_base = OTHER; note = 2'-deoxy-2'-fluorocytidine-3'-phosphate
  modified_base 17: mod_base = OTHER; note = 2'-O-methyladenosine-3'-phosphate
  modified_base 18: mod_base = OTHER; note = 2'-O-methyluridine-3'-phosphate
  modified_base 19: mod_base = OTHER; note = 2'-O-methyluridine-3'-phosphate
  modified_base 20: mod_base = OTHER; note = 2'-O-methylguanosine-3'-phosphate
  modified_base 21: mod_base = OTHER; note = 2'-O-methyluridine-3'-phosphorothioate
  modified_base 22: mod_base = OTHER; note = 2'-O-methylcytidine-3'-phosphorothioate
  modified_base 23: mod_base = OTHER; note = 2'-O-methyluridine
tataaattagtagctcattgtct

SEQ ID NO: 873 - RNA, 21 nt, synthetic construct
  source 1..21: mol_type = other RNA
  modified_base 1: mod_base = OTHER; note = 2'-O-methylguanosine-3'-phosphorothioate
  modified_base 2: mod_base = OTHER; note = 2'-O-methylcytidine-3'-phosphorothioate
  modified_base 3: mod_base = OTHER; note = 2'-O-methyladenosine-3'-phosphate
  modified_base 4: mod_base = OTHER; note = 2'-O-methylguanosine-3'-phosphate
  modified_base 5: mod_base = OTHER; note = 2'-O-methyladenosine-3'-phosphate
  modified_base 6: mod_base = OTHER; note = 2'-O-methyladenosine-3'-phosphate
  modified_base 7: mod_base = OTHER; note = 2'-deoxy-2'-fluorouridine-3'-phosphate
  modified_base 8: mod_base = OTHER; note = 2'-O-methyluridine-3'-phosphate
  modified_base 9: mod_base = OTHER; note = 2'-deoxy-2'-fluorouridine-3'-phosphate
  modified_base 10: mod_base = OTHER; note = 2'-deoxy-2'-fluorouridine-3'-phosphate
  modified_base 11: mod_base = OTHER; note = 2'-deoxy-2'-fluoroadenosine-3'-phosphate
  modified_base 12: mod_base = OTHER; note = 2'-O-methylcytidine-3'-phosphate
  modified_base 13: mod_base = OTHER; note = 2'-O-methyladenosine-3'-phosphate
  modified_base 14: mod_base = OTHER; note = 2'-O-methylcytidine-3'-phosphate
  modified_base 15: mod_base = OTHER; note = 2'-O-methyluridine-3'-phosphate
  modified_base 16: mod_base = OTHER; note = 2'-O-methylguanosine-3'-phosphate
  modified_base 17: mod_base = OTHER; note = 2'-O-methyluridine-3'-phosphate
  modified_base 18: mod_base = OTHER; note = 2'-O-methylguanosine-3'-phosphate
  modified_base 19: mod_base = OTHER; note = 2'-O-methyluridine-3'-phosphate
  modified_base 20: mod_base = OTHER; note = 2'-O-methyluridine-3'-phosphate
  modified_base 21: mod_base = OTHER; note = 2'-O-methyladenosine-3'-phosphate ((2S,4R)-1-[29-[[2-(acetylamino)-2-deoxy-beta-D-galactopyra nosyl]oxy]-14,14-bis[[3-[[3-[[5-[[2-(acetylamino)-2-deoxy-b eta-D-galactopyranosyl]oxy]-1-oxopentyl]amino]propyl]amino] -3-oxopropoxy]methyl]-1,12,19,25-tetraoxo-16-oxa-13,20,24-t riazanonacos-1-yl]-4-hydroxy-2-pyrrolidinyl)methyl ester
gcagaattttacactgtgtta

SEQ ID NO: 874 - RNA, 23 nt, synthetic construct
  source 1..23: mol_type = other RNA
  modified_base 1: mod_base = OTHER; note = 2'-O-methyluridine-3'-phosphorothioate 5'-(E)-Vinylphosphonate
  modified_base 2: mod_base = OTHER; note = 2'-deoxy-2'-fluoroadenosine-3'-phosphorothioate
  modified_base 3: mod_base = OTHER; note = 2'-O-methyladenosine-3'-phosphate
  modified_base 4: mod_base = OTHER; note = 2'-O-methylcytidine-3'-phosphate
  modified_base 5: mod_base = OTHER; note = 2'-O-methyladenosine-3'-phosphate
  modified_base 6: mod_base = OTHER; note = 2'-deoxy-2'-fluorocytidine-3'-phosphate
  modified_base 7: mod_base = OTHER; note = 2'-O-methyladenosine-3'-phosphate
  modified_base 8: mod_base = OTHER; note = 2'-deoxy-2'-fluoroguanosine-3'-phosphate
  modified_base 9: mod_base = OTHER; note = 2'-deoxy-2'-fluorouridine-3'-phosphate
  modified_base 10: mod_base = OTHER; note = 2'-O-methylguanosine-3'-phosphate
  modified_base 11: mod_base = OTHER; note = 2'-O-methyluridine-3'-phosphate
  modified_base 12: mod_base = OTHER; note = 2'-O-methyladenosine-3'-phosphate
  modified_base 13: mod_base = OTHER; note = 2'-O-methyladenosine-3'-phosphate
  modified_base 14: mod_base = OTHER; note = 2'-deoxy-2'-fluoroadenosine-3'-phosphate
  modified_base 15: mod_base = OTHER; note = 2'-O-methyladenosine-3'-phosphate
  modified_base 16: mod_base = OTHER; note = 2'-deoxy-2'-fluorouridine-3'-phosphate
  modified_base 17: mod_base = OTHER; note = 2'-O-methyluridine-3'-phosphate
  modified_base 18: mod_base = OTHER; note = 2'-O-methylcytidine-3'-phosphate
  modified_base 19: mod_base = OTHER; note = 2'-O-methyluridine-3'-phosphate
  modified_base 20: mod_base = OTHER; note = 2'-O-methylguanosine-3'-phosphate
  modified_base 21: mod_base = OTHER; note = 2'-O-methylcytidine-3'-phosphorothioate
  modified_base 22: mod_base = OTHER; note = 2'-O-methyladenosine-3'-phosphorothioate
  modified_base 23: mod_base = OTHER; note = 2'-O-methylguanosine
taacacagtgtaaaattctgcag

SEQ ID NO: 875 - RNA, 21 nt, synthetic construct
  source 1..21: mol_type = other RNA
  modified_base 1: mod_base = OTHER; note = 2'-O-methylguanosine-3'-phosphorothioate
  modified_base 2: mod_base = OTHER; note = 2'-O-methyladenosine-3'-phosphorothioate
  modified_base 3: mod_base = OTHER; note = 2'-O-methyladenosine-3'-phosphate
  modified_base 4: mod_base = OTHER; note = 2'-O-methyluridine-3'-phosphate
  modified_base 5: mod_base = OTHER; note = 2'-O-methyluridine-3'-phosphate
  modified_base 6: mod_base = OTHER; note = 2'-O-methyluridine-3'-phosphate
  modified_base 7: mod_base = OTHER; note = 2'-deoxy-2'-fluorouridine-3'-phosphate
  modified_base 8: mod_base = OTHER; note = 2'-O-methyladenosine-3'-phosphate
  modified_base 9: mod_base = OTHER; note = 2'-deoxy-2'-fluorocytidine-3'-phosphate
  modified_base 10: mod_base = OTHER; note = 2'-deoxy-2'-fluoroadenosine-3'-phosphate
  modified_base 11: mod_base = OTHER; note = 2'-deoxy-2'-fluorocytidine-3'-phosphate
  modified_base 12: mod_base = OTHER; note = 2'-O-methyluridine-3'-phosphate
  modified_base 13: mod_base = OTHER; note = 2'-O-methylguanosine-3'-phosphate
  modified_base 14: mod_base = OTHER; note = 2'-O-methyluridine-3'-phosphate
  modified_base 15: mod_base = OTHER; note = 2'-O-methylguanosine-3'-phosphate
  modified_base 16: mod_base = OTHER; note = 2'-O-methyluridine-3'-phosphate
  modified_base 17: mod_base = OTHER; note = 2'-O-methyluridine-3'-phosphate
  modified_base 18: mod_base = OTHER; note = 2'-O-methyluridine-3'-phosphate
  modified_base 19: mod_base = OTHER; note = 2'-O-methylcytidine-3'-phosphate
  modified_base 20: mod_base = OTHER; note = 2'-O-methylcytidine-3'-phosphate
  modified_base 21: mod_base = OTHER; note = 2'-O-methyladenosine-3'-phosphate ((2S,4R)-1-[29-[[2-(acetylamino)-2-deoxy-beta-D-galactopyra nosyl]oxy]-14,14-bis[[3-[[3-[[5-[[2-(acetylamino)-2-deoxy-b eta-D-galactopyranosyl]oxy]-1-oxopentyl]amino]propyl]amino] -3-oxopropoxy]methyl]-1,12,19,25-tetraoxo-16-oxa-13,20,24-t riazanonacos-1-yl]-4-hydroxy-2-pyrrolidinyl)methyl ester
gaattttacactgtgtttcca

SEQ ID NO: 876 - RNA, 23 nt, synthetic construct
  source 1..23: mol_type = other RNA
  modified_base 1: mod_base = OTHER; note = 2'-O-methyluridine-3'-phosphorothioate 5'-(E)-Vinylphosphonate
  modified_base 2: mod_base = OTHER; note = 2'-deoxy-2'-fluoroguanosine-3'-phosphorothioate
  modified_base 3: mod_base = OTHER; note = 2'-O-methylguanosine-3'-phosphate
  modified_base 4: mod_base = OTHER; note = 2'-O-methyladenosine-3'-phosphate
  modified_base 5: mod_base = OTHER; note = 2'-O-methyladenosine-3'-phosphate
  modified_base 6: mod_base = OTHER; note = 2'-deoxy-2'-fluoroadenosine-3'-phosphate
  modified_base 7: mod_base = OTHER; note = 2'-O-methylcytidine-3'-phosphate
  modified_base 8: mod_base = OTHER; note = 2'-deoxy-2'-fluoroadenosine-3'-phosphate
  modified_base 9: mod_base = OTHER; note = 2'-deoxy-2'-fluorocytidine-3'-phosphate
  modified_base 10: mod_base = OTHER; note = 2'-O-methyladenosine-3'-phosphate
  modified_base 11: mod_base = OTHER; note = 2'-O-methylguanosine-3'-phosphate
  modified_base 12: mod_base = OTHER; note = 2'-O-methyluridine-3'-phosphate
  modified_base 13: mod_base = OTHER; note = 2'-O-methylguanosine-3'-phosphate
  modified_base 14: mod_base = OTHER; note = 2'-deoxy-2'-fluorouridine-3'-phosphate
  modified_base 15: mod_base = OTHER; note = 2'-O-methyladenosine-3'-phosphate
  modified_base 16: mod_base = OTHER; note = 2'-deoxy-2'-fluoroadenosine-3'-phosphate
  modified_base 17: mod_base = OTHER; note = 2'-O-methyladenosine-3'-phosphate
  modified_base 18: mod_base = OTHER; note = 2'-O-methyladenosine-3'-phosphate
  modified_base 19: mod_base = OTHER; note = 2'-O-methyluridine-3'-phosphate
  modified_base 20: mod_base = OTHER; note = 2'-O-methyluridine-3'-phosphate
  modified_base 21: mod_base = OTHER; note = 2'-O-methylcytidine-3'-phosphorothioate
  modified_base 22: mod_base = OTHER; note = 2'-O-methyluridine-3'-phosphorothioate
  modified_base 23: mod_base = OTHER; note = 2'-O-methylguanosine
tggaaacacagtgtaaaattctg

SEQ ID NO: 877 - RNA, 21 nt, synthetic construct
  source 1..21: mol_type = other RNA
  modified_base 1: mod_base = OTHER; note = 2'-O-methylcytidine-3'-phosphorothioate
  modified_base 2: mod_base = OTHER; note = 2'-O-methyladenosine-3'-phosphorothioate
  modified_base 3: mod_base = OTHER; note = 2'-O-methylguanosine-3'-phosphate
  modified_base 4: mod_base = OTHER; note = 2'-O-methyladenosine-3'-phosphate
  modified_base 5: mod_base = OTHER; note = 2'-O-methyladenosine-3'-phosphate
  modified_base 6: mod_base = OTHER; note = 2'-O-methyluridine-3'-phosphate
  modified_base 7: mod_base = OTHER; note = 2'-deoxy-2'-fluorouridine-3'-phosphate
  modified_base 8: mod_base = OTHER; note = 2'-O-methyluridine-3'-phosphate
  modified_base 9: mod_base = OTHER; note = 2'-deoxy-2'-fluorouridine-3'-phosphate
  modified_base 10: mod_base = OTHER; note = 2'-deoxy-2'-fluoroadenosine-3'-phosphate
  modified_base 11: mod_base = OTHER; note = 2'-deoxy-2'-fluorocytidine-3'-phosphate
  modified_base 12: mod_base = OTHER; note = 2'-O-methyladenosine-3'-phosphate
  modified_base 13: mod_base = OTHER; note = 2'-O-methylcytidine-3'-phosphate
  modified_base 14: mod_base = OTHER; note = 2'-O-methyluridine-3'-phosphate
  modified_base 15: mod_base = OTHER; note = 2'-O-methylguanosine-3'-phosphate
  modified_base 16: mod_base = OTHER; note = 2'-O-methyluridine-3'-phosphate
  modified_base 17: mod_base = OTHER; note = 2'-O-methylguanosine-3'-phosphate
  modified_base 18: mod_base = OTHER; note = 2'-O-methyluridine-3'-phosphate
  modified_base 19: mod_base = OTHER; note = 2'-O-methyluridine-3'-phosphate
  modified_base 20: mod_base = OTHER; note = 2'-O-methyluridine-3'-phosphate
  modified_base 21: mod_base = OTHER; note = 2'-O-methyladenosine-3'-phosphate ((2S,4R)-1-[29-[[2-(acetylamino)-2-deoxy-beta-D-galactopyra nosyl]oxy]-14,14-bis[[3-[[3-[[5-[[2-(acetylamino)-2-deoxy-b eta-D-galactopyranosyl]oxy]-1-oxopentyl]amino]propyl]amino] -3-oxopropoxy]methyl]-1,12,19,25-tetraoxo-16-oxa-13,20,24-t riazanonacos-1-yl]-4-hydroxy-2-pyrrolidinyl)methyl ester
cagaattttacactgtgttta

SEQ ID NO: 878 - RNA, 23 nt, synthetic construct
  source 1..23: mol_type = other RNA
  modified_base 1: mod_base = OTHER; note = 2'-O-methyluridine-3'-phosphorothioate 5'-(E)-Vinylphosphonate
  modified_base 2: mod_base = OTHER; note = 2'-deoxy-2'-fluoroadenosine-3'-phosphorothioate
  modified_base 3: mod_base = OTHER; note = 2'-O-methyladenosine-3'-phosphate
  modified_base 4: mod_base = OTHER; note = 2'-O-methyladenosine-3'-phosphate
  modified_base 5: mod_base = OTHER; note = 2'-O-methylcytidine-3'-phosphate
  modified_base 6: mod_base = OTHER; note = 2'-deoxy-2'-fluoroadenosine-3'-phosphate
  modified_base 7: mod_base = OTHER; note = 2'-O-methylcytidine-3'-phosphate
  modified_base 8: mod_base = OTHER; note = 2'-deoxy-2'-fluoroadenosine-3'-phosphate
  modified_base 9: mod_base = OTHER; note = 2'-deoxy-2'-fluoroguanosine-3'-phosphate
  modified_base 10: mod_base = OTHER; note = 2'-O-methyluridine-3'-phosphate
  modified_base 11: mod_base = OTHER; note = 2'-O-methylguanosine-3'-phosphate
  modified_base 12: mod_base = OTHER; note = 2'-O-methyluridine-3'-phosphate
  modified_base 13: mod_base = OTHER; note = 2'-O-methyladenosine-3'-phosphate
  modified_base 14: mod_base = OTHER; note = 2'-deoxy-2'-fluoroadenosine-3'-phosphate
  modified_base 15: mod_base = OTHER; note = 2'-O-methyladenosine-3'-phosphate
  modified_base 16: mod_base = OTHER; note = 2'-deoxy-2'-fluoroadenosine-3'-phosphate
  modified_base 17: mod_base = OTHER; note = 2'-O-methyluridine-3'-phosphate
  modified_base 18: mod_base = OTHER; note = 2'-O-methyluridine-3'-phosphate
  modified_base 19: mod_base = OTHER; note = 2'-O-methylcytidine-3'-phosphate
  modified_base 20: mod_base = OTHER; note = 2'-O-methyluridine-3'-phosphate
  modified_base 21: mod_base = OTHER; note = 2'-O-methylguanosine-3'-phosphorothioate
  modified_base 22: mod_base = OTHER; note = 2'-O-methylcytidine-3'-phosphorothioate
  modified_base 23: mod_base = OTHER; note = 2'-O-methyladenosine
taaacacagtgtaaaattctgca

SEQ ID NO: 879 - RNA, 21 nt, synthetic construct
  source 1..21: mol_type = other RNA
  modified_base 1: mod_base = OTHER; note = 2'-O-methylcytidine-3'-phosphorothioate
  modified_base 2: mod_base = OTHER; note = 2'-O-methyluridine-3'-phosphorothioate
  modified_base 3: mod_base = OTHER; note = 2'-O-methylcytidine-3'-phosphate
  modified_base 4: mod_base = OTHER; note = 2'-O-methyladenosine-3'-phosphate
  modified_base 5: mod_base = OTHER; note = 2'-O-methylguanosine-3'-phosphate
  modified_base 6: mod_base = OTHER; note = 2'-O-methyladenosine-3'-phosphate
  modified_base 7: mod_base = OTHER; note = 2'-deoxy-2'-fluoroguanosine-3'-phosphate
  modified_base 8: mod_base = OTHER; note = 2'-O-methyluridine-3'-phosphate
  modified_base 9: mod_base = OTHER; note = 2'-deoxy-2'-fluorocytidine-3'-phosphate
  modified_base 10: mod_base = OTHER; note = 2'-deoxy-2'-fluorouridine-3'-phosphate
  modified_base 11: mod_base = OTHER; note = 2'-deoxy-2'-fluorouridine-3'-phosphate
  modified_base 12: mod_base = OTHER; note = 2'-O-methyluridine-3'-phosphate
  modified_base 13: mod_base = OTHER; note = 2'-O-methyluridine-3'-phosphate
  modified_base 14: mod_base = OTHER; note = 2'-O-methylcytidine-3'-phosphate
  modified_base 15: mod_base = OTHER; note = 2'-O-methyluridine-3'-phosphate
  modified_base 16: mod_base = OTHER; note = 2'-O-methylcytidine-3'-phosphate
  modified_base 17: mod_base = OTHER; note = 2'-O-methylcytidine-3'-phosphate
  modified_base 18: mod_base = OTHER; note = 2'-O-methyluridine-3'-phosphate
  modified_base 19: mod_base = OTHER; note = 2'-O-methyladenosine-3'-phosphate
  modified_base 20: mod_base = OTHER; note = 2'-O-methylcytidine-3'-phosphate
  modified_base 21: mod_base = OTHER; note = 2'-O-methyladenosine-3'-phosphate ((2S,4R)-1-[29-[[2-(acetylamino)-2-deoxy-beta-D-galactopyra nosyl]oxy]-14,14-bis[[3-[[3-[[5-[[2-(acetylamino)-2-deoxy-b eta-D-galactopyranosyl]oxy]-1-oxopentyl]amino]propyl]amino] -3-oxopropoxy]methyl]-1,12,19,25-tetraoxo-16-oxa-13,20,24-t riazanonacos-1-yl]-4-hydroxy-2-pyrrolidinyl)methyl ester
ctcagagtcttttctcctaca

SEQ ID NO: 880 - RNA, 23 nt, synthetic construct
  source 1..23: mol_type = other RNA
  modified_base 1: mod_base = OTHER; note = 2'-O-methyluridine-3'-phosphorothioate 5'-(E)-Vinylphosphonate
  modified_base 2: mod_base = OTHER; note = 2'-deoxy-2'-fluoroguanosine-3'-phosphorothioate
  modified_base 3: mod_base = OTHER; note = 2'-O-methyluridine-3'-phosphate
  modified_base 4: mod_base = OTHER; note = 2'-O-methyladenosine-3'-phosphate
  modified_base 5: mod_base = OTHER; note = 2'-O-methylguanosine-3'-phosphate
  modified_base 6: mod_base = OTHER; note = 2'-deoxy-2'-fluoroguanosine-3'-phosphate
  modified_base 7: mod_base = OTHER; note = 2'-O-methyladenosine-3'-phosphate
  modified_base 8: mod_base = OTHER; note = 2'-deoxy-2'-fluoroguanosine-3'-phosphate
  modified_base 9: mod_base = OTHER; note = 2'-deoxy-2'-fluoroadenosine-3'-phosphate
  modified_base 10: mod_base = OTHER; note = 2'-O-methyladenosine-3'-phosphate
  modified_base 11: mod_base = OTHER; note = 2'-O-methyladenosine-3'-phosphate
  modified_base 12: mod_base = OTHER; note = 2'-O-methyladenosine-3'-phosphate
  modified_base 13: mod_base = OTHER; note = 2'-O-methylguanosine-3'-phosphate
  modified_base 14: mod_base = OTHER; note = 2'-deoxy-2'-fluoroadenosine-3'-phosphate
  modified_base 15: mod_base = OTHER; note = 2'-O-methylcytidine-3'-phosphate
  modified_base 16: mod_base = OTHER; note = 2'-deoxy-2'-fluorouridine-3'-phosphate
  modified_base 17: mod_base = OTHER; note = 2'-O-methylcytidine-3'-phosphate
  modified_base 18: mod_base = OTHER; note = 2'-O-methyluridine-3'-phosphate
  modified_base 19: mod_base = OTHER; note = 2'-O-methylguanosine-3'-phosphate
  modified_base 20: mod_base = OTHER; note = 2'-O-methyladenosine-3'-phosphate
  modified_base 21: mod_base = OTHER; note = 2'-O-methylguanosine-3'-phosphorothioate
  modified_base 22: mod_base = OTHER; note = 2'-O-methyladenosine-3'-phosphorothioate
  modified_base 23: mod_base = OTHER; note = 2'-O-methylguanosine
tgtaggagaaaagactctgagag

SEQ ID NO: 881 - RNA, 21 nt, synthetic construct
  source 1..21: mol_type = other RNA
  modified_base 1: mod_base = OTHER; note = 2'-O-methylguanosine-3'-phosphorothioate
  modified_base 2: mod_base = OTHER; note = 2'-O-methyladenosine-3'-phosphorothioate
  modified_base 3: mod_base = OTHER; note = 2'-O-methylcytidine-3'-phosphate
  modified_base 4: mod_base = OTHER; note = 2'-O-methyladenosine-3'-phosphate
  modified_base 5: mod_base = OTHER; note = 2'-O-methyladenosine-3'-phosphate
  modified_base 6: mod_base = OTHER; note = 2'-O-methyluridine-3'-phosphate
  modified_base 7: mod_base = OTHER; note = 2'-deoxy-2'-fluoroguanosine-3'-phosphate
  modified_base 8: mod_base = OTHER; note = 2'-O-methyladenosine-3'-phosphate
  modified_base 9: mod_base = OTHER; note = 2'-deoxy-2'-fluoroguanosine-3'-phosphate
  modified_base 10: mod_base = OTHER; note = 2'-deoxy-2'-fluorocytidine-3'-phosphate
  modified_base 11: mod_base = OTHER; note = 2'-deoxy-2'-fluorouridine-3'-phosphate
  modified_base 12: mod_base = OTHER; note = 2'-O-methyladenosine-3'-phosphate
  modified_base 13: mod_base = OTHER; note = 2'-O-methylcytidine-3'-phosphate
  modified_base 14: mod_base = OTHER; note = 2'-O-methyluridine-3'-phosphate
  modified_base 15: mod_base = OTHER; note = 2'-O-methyladenosine-3'-phosphate
  modified_base 16: mod_base = OTHER; note = 2'-O-methyladenosine-3'-phosphate
  modified_base 17: mod_base = OTHER; note = 2'-O-methyluridine-3'-phosphate
  modified_base 18: mod_base = OTHER; note = 2'-O-methyluridine-3'-phosphate
  modified_base 19: mod_base = OTHER; note = 2'-O-methyluridine-3'-phosphate
  modified_base 20: mod_base = OTHER; note = 2'-O-methyladenosine-3'-phosphate
  modified_base 21: mod_base = OTHER; note = 2'-O-methyladenosine-3'-phosphate ((2S,4R)-1-[29-[[2-(acetylamino)-2-deoxy-beta-D-galactopyra nosyl]oxy]-14,14-bis[[3-[[3-[[5-[[2-(acetylamino)-2-deoxy-b eta-D-galactopyranosyl]oxy]-1-oxopentyl]amino]propyl]amino] -3-oxopropoxy]methyl]-1,12,19,25-tetraoxo-16-oxa-13,20,24-t riazanonacos-1-yl]-4-hydroxy-2-pyrrolidinyl)methyl ester
gacaatgagctactaatttaa

SEQ ID NO: 882 - RNA, 23 nt, synthetic construct
  source 1..23: mol_type = other RNA
  modified_base 1: mod_base = OTHER; note = 2'-O-methyluridine-3'-phosphorothioate 5'-(E)-Vinylphosphonate
  modified_base 2: mod_base = OTHER; note = 2'-deoxy-2'-fluorouridine-3'-phosphorothioate
  modified_base 3: mod_base = OTHER; note = 2'-O-methyladenosine-3'-phosphate
  modified_base 4: mod_base = OTHER; note = 2'-O-methyladenosine-3'-phosphate
  modified_base 5: mod_base = OTHER; note = 2'-O-methyladenosine-3'-phosphate
  modified_base 6: mod_base = OTHER; note = 2'-deoxy-2'-fluorouridine-3'-phosphate
  modified_base 7: mod_base = OTHER; note = 2'-O-methyluridine-3'-phosphate
  modified_base 8: mod_base = OTHER; note = 2'-deoxy-2'-fluoroadenosine-3'-phosphate
  modified_base 9: mod_base = OTHER; note = 2'-deoxy-2'-fluoroguanosine-3'-phosphate
  modified_base 10: mod_base = OTHER; note = 2'-O-methyluridine-3'-phosphate
  modified_base 11: mod_base = OTHER; note = 2'-O-methyladenosine-3'-phosphate
  modified_base 12: mod_base = OTHER; note = 2'-O-methylguanosine-3'-phosphate
  modified_base 13: mod_base = OTHER; note = 2'-O-methylcytidine-3'-phosphate
  modified_base 14: mod_base = OTHER; note = 2'-deoxy-2'-fluorouridine-3'-phosphate
  modified_base 15: mod_base = OTHER; note = 2'-O-methylcytidine-3'-phosphate
  modified_base 16: mod_base = OTHER; note = 2'-deoxy-2'-fluoroadenosine-3'-phosphate
  modified_base 17: mod_base = OTHER; note = 2'-O-methyluridine-3'-phosphate
  modified_base 18: mod_base = OTHER; note = 2'-O-methyluridine-3'-phosphate
  modified_base 19: mod_base = OTHER; note = 2'-O-methylguanosine-3'-phosphate
  modified_base 20: mod_base = OTHER; note = 2'-O-methyluridine-3'-phosphate
  modified_base 21: mod_base = OTHER; note = 2'-O-methylcytidine-3'-phosphorothioate
  modified_base 22: mod_base = OTHER; note = 2'-O-methyluridine-3'-phosphorothioate
  modified_base 23: mod_base = OTHER; note = 2'-O-methylcytidine
ttaaattagtagctcattgtctc

SEQ ID NO: 883 - RNA, 21 nt, synthetic construct
  source 1..21: mol_type = other RNA
  modified_base 1: mod_base = OTHER; note = 2'-O-methyladenosine-3'-phosphorothioate
  modified_base 2: mod_base = OTHER; note = 2'-O-methylguanosine-3'-phosphorothioate
  modified_base 3: mod_base = OTHER; note = 2'-O-methyladenosine-3'-phosphate
  modified_base 4: mod_base = OTHER; note = 2'-O-methylcytidine-3'-phosphate
  modified_base 5: mod_base = OTHER; note = 2'-O-methyladenosine-3'-phosphate
  modified_base 6: mod_base = OTHER; note = 2'-O-methyladenosine-3'-phosphate
  modified_base 7: mod_base = OTHER; note = 2'-deoxy-2'-fluorouridine-3'-phosphate
  modified_base 8: mod_base = OTHER; note = 2'-O-methylguanosine-3'-phosphate
  modified_base 9: mod_base = OTHER; note = 2'-deoxy-2'-fluoroadenosine-3'-phosphate
  modified_base 10: mod_base = OTHER; note = 2'-deoxy-2'-fluoroguanosine-3'-phosphate
  modified_base 11: mod_base = OTHER; note = 2'-deoxy-2'-fluorocytidine-3'-phosphate
  modified_base 12: mod_base = OTHER; note = 2'-O-methyluridine-3'-phosphate
  modified_base 13: mod_base = OTHER; note = 2'-O-methyladenosine-3'-phosphate
  modified_base 14: mod_base = OTHER; note = 2'-O-methylcytidine-3'-phosphate
  modified_base 15: mod_base = OTHER; note = 2'-O-methyluridine-3'-phosphate
  modified_base 16: mod_base = OTHER; note = 2'-O-methyladenosine-3'-phosphate
  modified_base 17: mod_base = OTHER; note = 2'-O-methyladenosine-3'-phosphate
  modified_base 18: mod_base = OTHER; note = 2'-O-methyluridine-3'-phosphate
  modified_base 19: mod_base = OTHER; note = 2'-O-methyluridine-3'-phosphate
  modified_base 20: mod_base = OTHER; note = 2'-O-methyluridine-3'-phosphate
  modified_base 21: mod_base = OTHER; note = 2'-O-methyladenosine-3'-phosphate ((2S,4R)-1-[29-[[2-(acetylamino)-2-deoxy-beta-D-galactopyra nosyl]oxy]-14,14-bis[[3-[[3-[[5-[[2-(acetylamino)-2-deoxy-b eta-D-galactopyranosyl]oxy]-1-oxopentyl]amino]propyl]amino] -3-oxopropoxy]methyl]-1,12,19,25-tetraoxo-16-oxa-13,20,24-t riazanonacos-1-yl]-4-hydroxy-2-pyrrolidinyl)methyl ester
agacaatgagctactaattta

SEQ ID NO: 884 - RNA, 23 nt, synthetic construct
  source 1..23: mol_type = other RNA
  modified_base 1: mod_base = OTHER; note = 2'-O-methyluridine-3'-phosphorothioate 5'-(E)-Vinylphosphonate
  modified_base 2: mod_base = OTHER; note = 2'-deoxy-2'-fluoroadenosine-3'-phosphorothioate
  modified_base 3: mod_base = OTHER; note = 2'-O-methyladenosine-3'-phosphate
  modified_base 4: mod_base = OTHER; note = 2'-O-methyladenosine-3'-phosphate
  modified_base 5: mod_base = OTHER; note = 2'-O-methyluridine-3'-phosphate
  modified_base 6: mod_base = OTHER; note = 2'-deoxy-2'-fluorouridine-3'-phosphate
  modified_base 7: mod_base = OTHER; note = 2'-O-methyladenosine-3'-phosphate
  modified_base 8: mod_base = OTHER; note = 2'-deoxy-2'-fluoroguanosine-3'-phosphate
  modified_base 9: mod_base = OTHER; note = 2'-deoxy-2'-fluorouridine-3'-phosphate
  modified_base 10: mod_base = OTHER; note = 2'-O-methyladenosine-3'-phosphate
  modified_base 11: mod_base = OTHER; note = 2'-O-methylguanosine-3'-phosphate
  modified_base 12: mod_base = OTHER; note = 2'-O-methylcytidine-3'-phosphate
  modified_base 13: mod_base = OTHER; note = 2'-O-methyluridine-3'-phosphate
  modified_base 14: mod_base = OTHER; note = 2'-deoxy-2'-fluorocytidine-3'-phosphate
  modified_base 15: mod_base = OTHER; note = 2'-O-methyladenosine-3'-phosphate
  modified_base 16: mod_base = OTHER; note = 2'-deoxy-2'-fluorouridine-3'-phosphate
  modified_base 17: mod_base = OTHER; note = 2'-O-methyluridine-3'-phosphate
  modified_base 18: mod_base = OTHER; note = 2'-O-methylguanosine-3'-phosphate
  modified_base 19: mod_base = OTHER; note = 2'-O-methyluridine-3'-phosphate
  modified_base 20: mod_base = OTHER; note = 2'-O-methylcytidine-3'-phosphate
  modified_base 21: mod_base = OTHER; note = 2'-O-methyluridine-3'-phosphorothioate
  modified_base 22: mod_base = OTHER; note = 2'-O-methylcytidine-3'-phosphorothioate
  modified_base 23: mod_base = OTHER; note = 2'-O-methyluridine
taaattagtagctcattgtctct

SEQ ID NO: 885 - RNA, 21 nt, synthetic construct
  source 1..21: mol_type = other RNA
  modified_base 1: mod_base = OTHER; note = 2'-O-methyladenosine-3'-phosphorothioate
  modified_base 2: mod_base = OTHER; note = 2'-O-methyluridine-3'-phosphorothioate
  modified_base 3: mod_base = OTHER; note = 2'-O-methylguanosine-3'-phosphate
  modified_base 4: mod_base = OTHER; note = 2'-O-methylguanosine-3'-phosphate
  modified_base 5: mod_base = OTHER; note = 2'-O-methyladenosine-3'-phosphate
  modified_base 6: mod_base = OTHER; note = 2'-O-methyladenosine-3'-phosphate
  modified_base 7: mod_base = OTHER; note = 2'-deoxy-2'-fluoroadenosine-3'-phosphate
  modified_base 8: mod_base = OTHER; note = 2'-O-methylguanosine-3'-phosphate
  modified_base 9: mod_base = OTHER; note = 2'-deoxy-2'-fluorocytidine-3'-phosphate
  modified_base 10: mod_base = OTHER; note = 2'-deoxy-2'-fluorocytidine-3'-phosphate
  modified_base 11: mod_base = OTHER; note = 2'-deoxy-2'-fluorouridine-3'-phosphate
  modified_base 12: mod_base = OTHER; note = 2'-O-methyluridine-3'-phosphate
  modified_base 13: mod_base = OTHER; note = 2'-O-methylguanosine-3'-phosphate
  modified_base 14: mod_base = OTHER; note = 2'-O-methylguanosine-3'-phosphate
  modified_base 15: mod_base = OTHER; note = 2'-O-methylguanosine-3'-phosphate
  modified_base 16: mod_base = OTHER; note = 2'-O-methyluridine-3'-phosphate
  modified_base 17: mod_base = OTHER; note = 2'-O-methyladenosine-3'-phosphate
  modified_base 18: mod_base = OTHER; note = 2'-O-methyladenosine-3'-phosphate
  modified_base 19: mod_base = OTHER; note = 2'-O-methyladenosine-3'-phosphate
  modified_base 20: mod_base = OTHER; note = 2'-O-methyladenosine-3'-phosphate
  modified_base 21: mod_base = OTHER; note = 2'-O-methyladenosine-3'-phosphate ((2S,4R)-1-[29-[[2-(acetylamino)-2-deoxy-beta-D-galactopyra nosyl]oxy]-14,14-bis[[3-[[3-[[5-[[2-(acetylamino)-2-deoxy-b eta-D-galactopyranosyl]oxy]-1-oxopentyl]amino]propyl]amino] -3-oxopropoxy]methyl]-1,12,19,25-tetraoxo-16-oxa-13,20,24-t riazanonacos-1-yl]-4-hydroxy-2-pyrrolidinyl)methyl ester
atggaaagccttgggtaaaaa

SEQ ID NO: 886 - RNA, 23 nt, synthetic construct
  source 1..23: mol_type = other RNA
  modified_base 1: mod_base = OTHER; note = 2'-O-methyluridine-3'-phosphorothioate 5'-(E)-Vinylphosphonate
  modified_base 2: mod_base = OTHER; note = 2'-deoxy-2'-fluorouridine-3'-phosphorothioate
  modified_base 3: mod_base = OTHER; note = 2'-O-methyluridine-3'-phosphate
  modified_base 4: mod_base = OTHER; note = 2'-O-methyluridine-3'-phosphate
  modified_base 5: mod_base = OTHER; note = 2'-O-methyluridine-3'-phosphate
  modified_base 6: mod_base = OTHER; note = 2'-deoxy-2'-fluoroadenosine-3'-phosphate
  modified_base 7: mod_base = OTHER; note = 2'-O-methylcytidine-3'-phosphate
  modified_base 8: mod_base = OTHER; note = 2'-deoxy-2'-fluorocytidine-3'-phosphate
  modified_base 9: mod_base = OTHER; note = 2'-deoxy-2'-fluorocytidine-3'-phosphate
  modified_base 10: mod_base = OTHER; note = 2'-O-methyladenosine-3'-phosphate
  modified_base 11: mod_base = OTHER; note = 2'-O-methyladenosine-3'-phosphate
  modified_base 12: mod_base = OTHER; note = 2'-O-methylguanosine-3'-phosphate
  modified_base 13: mod_base = OTHER; note = 2'-O-methylguanosine-3'-phosphate
  modified_base 14: mod_base = OTHER; note = 2'-deoxy-2'-fluorocytidine-3'-phosphate
  modified_base 15: mod_base = OTHER; note = 2'-O-methyluridine-3'-phosphate
  modified_base 16: mod_base = OTHER; note = 2'-deoxy-2'-fluorouridine-3'-phosphate
  modified_base 17: mod_base = OTHER; note = 2'-O-methyluridine-3'-phosphate
  modified_base 18: mod_base = OTHER; note = 2'-O-methylcytidine-3'-phosphate
  modified_base 19: mod_base = OTHER; note = 2'-O-methylcytidine-3'-phosphate
  modified_base 20: mod_base = OTHER; note = 2'-O-methyladenosine-3'-phosphate
  modified_base 21: mod_base = OTHER; note = 2'-O-methyluridine-3'-phosphorothioate
  modified_base 22: mod_base = OTHER; note = 2'-O-methyluridine-3'-phosphorothioate
  modified_base 23: mod_base = OTHER; note = 2'-O-methylguanosine
tttttacccaaggctttccattg

SEQ ID NO: 887 - RNA, 21 nt, synthetic construct
  source 1..21: mol_type = other RNA
  modified_base 1: mod_base = OTHER; note = 2'-O-methylcytidine-3'-phosphorothioate
  modified_base 2: mod_base = OTHER; note = 2'-O-methylcytidine-3'-phosphorothioate
  modified_base 3: mod_base = OTHER; note = 2'-O-methylcytidine-3'-phosphate
  modified_base 4: mod_base = OTHER; note = 2'-O-methylguanosine-3'-phosphate
  modified_base 5: mod_base = OTHER; note = 2'-O-methylcytidine-3'-phosphate
  modified_base 6: mod_base = OTHER; note = 2'-O-methyluridine-3'-phosphate
  modified_base 7: mod_base = OTHER; note = 2'-deoxy-2'-fluorocytidine-3'-phosphate
  modified_base 8: mod_base = OTHER; note = 2'-O-methyluridine-3'-phosphate
  modified_base 9: mod_base = OTHER; note = 2'-deoxy-2'-fluorocytidine-3'-phosphate
  modified_base 10: mod_base = OTHER; note = 2'-deoxy-2'-fluoroadenosine-3'-phosphate
  modified_base 11: mod_base = OTHER; note = 2'-deoxy-2'-fluoroguanosine-3'-phosphate
  modified_base 12: mod_base = OTHER; note = 2'-O-methyladenosine-3'-phosphate
  modified_base 13: mod_base = OTHER; note = 2'-O-methylguanosine-3'-phosphate
  modified_base 14: mod_base = OTHER; note = 2'-O-methyluridine-3'-phosphate
  modified_base 15: mod_base = OTHER; note = 2'-O-methylcytidine-3'-phosphate
  modified_base 16: mod_base = OTHER; note = 2'-O-methyluridine-3'-phosphate
  modified_base 17: mod_base = OTHER; note = 2'-O-methyluridine-3'-phosphate
  modified_base 18: mod_base = OTHER; note = 2'-O-methyluridine-3'-phosphate
  modified_base 19: mod_base = OTHER; note = 2'-O-methyluridine-3'-phosphate
  modified_base 20: mod_base = OTHER; note = 2'-O-methylcytidine-3'-phosphate
  modified_base 21: mod_base = OTHER; note = 2'-O-methyladenosine-3'-phosphate ((2S,4R)-1-[29-[[2-(acetylamino)-2-deoxy-beta-D-galactopyra nosyl]oxy]-14,14-bis[[3-[[3-[[5-[[2-(acetylamino)-2-deoxy-b eta-D-galactopyranosyl]oxy]-1-oxopentyl]amino]propyl]amino] -3-oxopropoxy]methyl]-1,12,19,25-tetraoxo-16-oxa-13,20,24-t riazanonacos-1-yl]-4-hydroxy-2-pyrrolidinyl)methyl ester
cccgctctcagagtcttttca

SEQ ID NO: 888 - RNA, 23 nt, synthetic construct
  source 1..23: mol_type = other RNA
  modified_base 1: mod_base = OTHER; note = 2'-O-methyluridine-3'-phosphorothioate 5'-(E)-Vinylphosphonate
  modified_base 2: mod_base = OTHER; note = 2'-deoxy-2'-fluoroguanosine-3'-phosphorothioate
  modified_base 3: mod_base = OTHER; note = 2'-O-methyladenosine-3'-phosphate
  modified_base 4: mod_base = OTHER; note = 2'-O-methyladenosine-3'-phosphate
  modified_base 5: mod_base = OTHER; note = 2'-O-methyladenosine-3'-phosphate
  modified_base 6: mod_base = OTHER; note = 2'-deoxy-2'-fluoroadenosine-3'-phosphate
  modified_base 7: mod_base = OTHER; note = 2'-O-methylguanosine-3'-phosphate
  modified_base 8: mod_base = OTHER; note = 2'-deoxy-2'-fluoroadenosine-3'-phosphate
  modified_base 9: mod_base = OTHER; note = 2'-deoxy-2'-fluorocytidine-3'-phosphate
  modified_base 10: mod_base = OTHER; note = 2'-O-methyluridine-3'-phosphate
  modified_base 11: mod_base = OTHER; note = 2'-O-methylcytidine-3'-phosphate
  modified_base 12: mod_base = OTHER; note = 2'-O-methyluridine-3'-phosphate
  modified_base 13: mod_base = OTHER; note = 2'-O-methylguanosine-3'-phosphate
  modified_base 14: mod_base = OTHER; note = 2'-deoxy-2'-fluoroadenosine-3'-phosphate
  modified_base 15: mod_base = OTHER; note = 2'-O-methylguanosine-3'-phosphate
  modified_base 16: mod_base = OTHER; note = 2'-deoxy-2'-fluoroadenosine-3'-phosphate
  modified_base 17: mod_base = OTHER; note = 2'-O-methylguanosine-3'-phosphate
  modified_base 18: mod_base = OTHER; note = 2'-O-methylcytidine-3'-phosphate
  modified_base 19: mod_base = OTHER; note = 2'-O-methylguanosine-3'-phosphate
  modified_base 20: mod_base = OTHER; note = 2'-O-methylguanosine-3'-phosphate
  modified_base 21: mod_base = OTHER; note = 2'-O-methylguanosine-3'-phosphorothioate
  modified_base 22: mod_base = OTHER; note = 2'-O-methyladenosine-3'-phosphorothioate
  modified_base 23: mod_base = OTHER; note = 2'-O-methyladenosine
tgaaaagactctgagagcgggaa

SEQ ID NO: 889 - RNA, 21 nt, synthetic construct
  source 1..21: mol_type = other RNA
  modified_base 1: mod_base = OTHER; note = 2'-O-methyluridine-3'-phosphorothioate
  modified_base 2: mod_base = OTHER; note = 2'-O-methylcytidine-3'-phosphorothioate
  modified_base 3: mod_base = OTHER; note = 2'-O-methyladenosine-3'-phosphate
  modified_base 4: mod_base = OTHER; note = 2'-O-methylguanosine-3'-phosphate
  modified_base 5: mod_base = OTHER; note = 2'-O-methyladenosine-3'-phosphate
  modified_base 6: mod_base = OTHER; note = 2'-O-methylguanosine-3'-phosphate
  modified_base 7: mod_base = OTHER; note = 2'-deoxy-2'-fluorouridine-3'-phosphate
  modified_base 8: mod_base = OTHER; note = 2'-O-methylcytidine-3'-phosphate
  modified_base 9: mod_base = OTHER; note = 2'-deoxy-2'-fluorouridine-3'-phosphate
  modified_base 10: mod_base = OTHER; note = 2'-deoxy-2'-fluorouridine-3'-phosphate
  modified_base 11: mod_base = OTHER; note = 2'-deoxy-2'-fluorouridine-3'-phosphate
  modified_base 12: mod_base = OTHER; note = 2'-O-methyluridine-3'-phosphate
  modified_base 13: mod_base = OTHER; note = 2'-O-methylcytidine-3'-phosphate
  modified_base 14: mod_base = OTHER; note = 2'-O-methyluridine-3'-phosphate
  modified_base 15: mod_base = OTHER; note = 2'-O-methylcytidine-3'-phosphate
  modified_base 16: mod_base = OTHER; note = 2'-O-methylcytidine-3'-phosphate
  modified_base 17: mod_base = OTHER; note = 2'-O-methyluridine-3'-phosphate
  modified_base 18: mod_base = OTHER; note = 2'-O-methyladenosine-3'-phosphate
  modified_base 19: mod_base = OTHER; note = 2'-O-methylcytidine-3'-phosphate
  modified_base 20: mod_base = OTHER; note = 2'-O-methyladenosine-3'-phosphate
  modified_base 21: mod_base = OTHER; note = 2'-O-methyladenosine-3'-phosphate ((2S,4R)-1-[29-[[2-(acetylamino)-2-deoxy-beta-D-galactopyra nosyl]oxy]-14,14-bis[[3-[[3-[[5-[[2-(acetylamino)-2-deoxy-b eta-D-galactopyranosyl]oxy]-1-oxopentyl]amino]propyl]amino] -3-oxopropoxy]methyl]-1,12,19,25-tetraoxo-16-oxa-13,20,24-t riazanonacos-1-yl]-4-hydroxy-2-pyrrolidinyl)methyl ester
tcagagtcttttctcctacaa

SEQ ID NO: 890 - RNA, 23 nt, synthetic construct
  source 1..23: mol_type = other RNA
  modified_base 1: mod_base = OTHER; note = 2'-O-methyluridine-3'-phosphorothioate 5'-(E)-Vinylphosphonate
  modified_base 2: mod_base = OTHER; note = 2'-deoxy-2'-fluorouridine-3'-phosphorothioate
  modified_base 3: mod_base = OTHER; note = 2'-O-methylguanosine-3'-phosphate
  modified_base 4: mod_base = OTHER; note = 2'-O-methyluridine-3'-phosphate
  modified_base 5: mod_base = OTHER; note = 2'-O-methyladenosine-3'-phosphate
  modified_base 6: mod_base = OTHER; note = 2'-deoxy-2'-fluoroguanosine-3'-phosphate
  modified_base 7: mod_base = OTHER; note = 2'-O-methylguanosine-3'-phosphate
  modified_base 8: mod_base = OTHER; note = 2'-deoxy-2'-fluoroadenosine-3'-phosphate
  modified_base 9: mod_base = OTHER; note = 2'-deoxy-2'-fluoroguanosine-3'-phosphate
  modified_base 10: mod_base = OTHER; note = 2'-O-methyladenosine-3'-phosphate
  modified_base 11: mod_base = OTHER; note = 2'-O-methyladenosine-3'-phosphate
  modified_base 12: mod_base = OTHER; note = 2'-O-methyladenosine-3'-phosphate
  modified_base 13: mod_base = OTHER; note = 2'-O-methyladenosine-3'-phosphate
  modified_base 14: mod_base = OTHER; note = 2'-deoxy-2'-fluoroguanosine-3'-phosphate
  modified_base 15: mod_base = OTHER; note = 2'-O-methyladenosine-3'-phosphate
  modified_base 16: mod_base = OTHER; note = 2'-deoxy-2'-fluorocytidine-3'-phosphate
  modified_base 17: mod_base = OTHER; note = 2'-O-methyluridine-3'-phosphate
  modified_base 18: mod_base = OTHER; note = 2'-O-methylcytidine-3'-phosphate
  modified_base 19: mod_base = OTHER; note = 2'-O-methyluridine-3'-phosphate
  modified_base 20: mod_base = OTHER; note = 2'-O-methylguanosine-3'-phosphate
  modified_base 21: mod_base = OTHER; note = 2'-O-methyladenosine-3'-phosphorothioate
  modified_base 22: mod_base = OTHER; note = 2'-O-methylguanosine-3'-phosphorothioate
  modified_base 23: mod_base = OTHER; note = 2'-O-methyladenosine
ttgtaggagaaaagactctgaga

SEQ ID NO: 891 - RNA, 21 nt, synthetic construct
  source 1..21: mol_type = other RNA
  modified_base 1: mod_base = OTHER; note = 2'-O-methylguanosine-3'-phosphorothioate
  modified_base 2: mod_base = OTHER; note = 2'-O-methyladenosine-3'-phosphorothioate
  modified_base 3: mod_base = OTHER; note = 2'-O-methylguanosine-3'-phosphate
  modified_base 4: mod_base = OTHER; note = 2'-O-methyladenosine-3'-phosphate
  modified_base 5: mod_base = OTHER; note = 2'-O-methylcytidine-3'-phosphate
  modified_base 6: mod_base = OTHER; note = 2'-O-methyladenosine-3'-phosphate
  modified_base 7: mod_base = OTHER; note = 2'-deoxy-2'-fluoroadenosine-3'-phosphate
  modified_base 8: mod_base = OTHER; note = 2'-O-methyluridine-3'-phosphate
  modified_base 9: mod_base = OTHER; note = 2'-deoxy-2'-fluoroguanosine-3'-phosphate
  modified_base 10: mod_base = OTHER; note = 2'-deoxy-2'-fluoroadenosine-3'-phosphate
  modified_base 11: mod_base = OTHER; note = 2'-deoxy-2'-fluoroguanosine-3'-phosphate
  modified_base 12: mod_base = OTHER; note = 2'-O-methylcytidine-3'-phosphate
  modified_base 13: mod_base = OTHER; note = 2'-O-methyluridine-3'-phosphate
  modified_base 14: mod_base = OTHER; note = 2'-O-methyladenosine-3'-phosphate
  modified_base 15: mod_base = OTHER; note = 2'-O-methylcytidine-3'-phosphate
  modified_base 16: mod_base = OTHER; note = 2'-O-methyluridine-3'-phosphate
  modified_base 17: mod_base = OTHER; note = 2'-O-methyladenosine-3'-phosphate
  modified_base 18: mod_base = OTHER; note = 2'-O-methyladenosine-3'-phosphate
  modified_base 19: mod_base = OTHER; note = 2'-O-methyluridine-3'-phosphate
  modified_base 20: mod_base = OTHER; note = 2'-O-methyluridine-3'-phosphate
  modified_base 21: mod_base = OTHER; note = 2'-O-methyladenosine-3'-phosphate ((2S,4R)-1-[29-[[2-(acetylamino)-2-deoxy-beta-D-galactopyra nosyl]oxy]-14,14-bis[[3-[[3-[[5-[[2-(acetylamino)-2-deoxy-b eta-D-galactopyranosyl]oxy]-1-oxopentyl]amino]propyl]amino] -3-oxopropoxy]methyl]-1,12,19,25-tetraoxo-16-oxa-13,20,24-t riazanonacos-1-yl]-4-hydroxy-2-pyrrolidinyl)methyl ester
gagacaatgagctactaatta

SEQ ID NO: 892 - RNA, 23 nt, synthetic construct
  source 1..23: mol_type = other RNA
  modified_base 1: mod_base = OTHER; note = 2'-O-methyluridine-3'-phosphorothioate 5'-(E)-Vinylphosphonate
  modified_base 2: mod_base = OTHER; note = 2'-deoxy-2'-fluoroadenosine-3'-phosphorothioate
  modified_base 3: mod_base = OTHER; note = 2'-O-methyladenosine-3'-phosphate
  modified_base 4: mod_base = OTHER; note = 2'-O-methyluridine-3'-phosphate
  modified_base 5: mod_base = OTHER; note = 2'-O-methyluridine-3'-phosphate
  modified_base 6: mod_base = OTHER; note = 2'-deoxy-2'-fluoroadenosine-3'-phosphate
  modified_base 7: mod_base = OTHER; note = 2'-O-methylguanosine-3'-phosphate
  modified_base 8: mod_base = OTHER; note = 2'-deoxy-2'-fluorouridine-3'-phosphate
  modified_base 9: mod_base = OTHER; note = 2'-deoxy-2'-fluoroadenosine-3'-phosphate
  modified_base 10: mod_base = OTHER; note = 2'-O-methylguanosine-3'-phosphate
  modified_base 11: mod_base = OTHER; note = 2'-O-methylcytidine-3'-phosphate
  modified_base 12: mod_base = OTHER; note = 2'-O-methyluridine-3'-phosphate
  modified_base 13: mod_base = OTHER; note = 2'-O-methylcytidine-3'-phosphate
  modified_base 14: mod_base = OTHER; note = 2'-deoxy-2'-fluoroadenosine-3'-phosphate
  modified_base 15: mod_base = OTHER; note = 2'-O-methyluridine-3'-phosphate
  modified_base 16: mod_base = OTHER; note = 2'-deoxy-2'-fluorouridine-3'-phosphate
  modified_base 17: mod_base = OTHER; note = 2'-O-methylguanosine-3'-phosphate
  modified_base 18: mod_base = OTHER; note = 2'-O-methyluridine-3'-phosphate
  modified_base 19: mod_base = OTHER; note = 2'-O-methylcytidine-3'-phosphate
  modified_base 20: mod_base = OTHER; note = 2'-O-methyluridine-3'-phosphate
  modified_base 21: mod_base = OTHER; note = 2'-O-methylcytidine-3'-phosphorothioate
  modified_base 22: mod_base = OTHER; note = 2'-O-methyluridine-3'-phosphorothioate
  modified_base 23: mod_base = OTHER; note = 2'-O-methylguanosine
taattagtagctcattgtctctg

SEQ ID NO: 893 - RNA, 21 nt, synthetic construct
  source 1..21: mol_type = other RNA
  modified_base 1: mod_base = OTHER; note = 2'-O-methyluridine-3'-phosphorothioate
  modified_base 2: mod_base = OTHER; note = 2'-O-methyluridine-3'-phosphorothioate
  modified_base 3: mod_base = OTHER; note = 2'-O-methylcytidine-3'-phosphate
  modified_base 4: mod_base = OTHER; note = 2'-O-methyladenosine-3'-phosphate
  modified_base 5: mod_base = OTHER; note = 2'-O-methylcytidine-3'-phosphate
  modified_base 6: mod_base = OTHER; note = 2'-O-methylcytidine-3'-phosphate
  modified_base 7: mod_base = OTHER; note = 2'-deoxy-2'-fluoroadenosine-3'-phosphate
  modified_base 8: mod_base = OTHER; note = 2'-O-methylguanosine-3'-phosphate
  modified_base 9: mod_base = OTHER; note = 2'-deoxy-2'-fluorocytidine-3'-phosphate
  modified_base 10: mod_base = OTHER; note = 2'-deoxy-2'-fluorocytidine-3'-phosphate
  modified_base 11: mod_base = OTHER; note = 2'-deoxy-2'-fluorouridine-3'-phosphate
  modified_base 12: mod_base = OTHER; note = 2'-O-methyluridine-3'-phosphate
  modified_base 13: mod_base = OTHER; note = 2'-O-methylcytidine-3'-phosphate
  modified_base 14: mod_base = OTHER; note = 2'-O-methyluridine-3'-phosphate
  modified_base 15: mod_base = OTHER; note = 2'-O-methyluridine-3'-phosphate
  modified_base 16: mod_base = OTHER; note = 2'-O-methyluridine-3'-phosphate
  modified_base 17: mod_base = OTHER; note = 2'-O-methylcytidine-3'-phosphate
  modified_base 18: mod_base = OTHER; note = 2'-O-methyladenosine-3'-phosphate
  modified_base 19: mod_base = OTHER; note = 2'-O-methylguanosine-3'-phosphate
  modified_base 20: mod_base = OTHER; note = 2'-O-methyladenosine-3'-phosphate
  modified_base 21: mod_base = OTHER; note = 2'-O-methyladenosine-3'-phosphate ((2S,4R)-1-[29-[[2-(acetylamino)-2-deoxy-beta-D-galactopyra nosyl]oxy]-14,14-bis[[3-[[3-[[5-[[2-(acetylamino)-2-deoxy-b eta-D-galactopyranosyl]oxy]-1-oxopentyl]amino]propyl]amino] -3-oxopropoxy]methyl]-1,12,19,25-tetraoxo-16-oxa-13,20,24-t riazanonacos-1-yl]-4-hydroxy-2-pyrrolidinyl)methyl ester
ttcaccagccttctttcagaa

SEQ ID NO: 894 - RNA, 23 nt, synthetic construct
  source 1..23: mol_type = other RNA
  modified_base 1: mod_base = OTHER; note = 2'-O-methyluridine-3'-phosphorothioate 5'-(E)-Vinylphosphonate
  modified_base 2: mod_base = OTHER; note = 2'-deoxy-2'-fluorouridine-3'-phosphorothioate
  modified_base 3: mod_base = OTHER; note = 2'-O-methylcytidine-3'-phosphate
  modified_base 4: mod_base = OTHER; note = 2'-O-methyluridine-3'-phosphate
  modified_base 5: mod_base = OTHER; note = 2'-O-methylguanosine-3'-phosphate
  modified_base 6: mod_base = OTHER; note = 2'-deoxy-2'-fluoroadenosine-3'-phosphate
  modified_base 7: mod_base = OTHER; note = 2'-O-methyladenosine-3'-phosphate
  modified_base 8: mod_base = OTHER; note = 2'-deoxy-2'-fluoroadenosine-3'-phosphate
  modified_base 9: mod_base = OTHER; note = 2'-deoxy-2'-fluoroguanosine-3'-phosphate
  modified_base 10: mod_base = OTHER; note = 2'-O-methyladenosine-3'-phosphate
  modified_base 11: mod_base = OTHER; note = 2'-O-methyladenosine-3'-phosphate
  modified_base 12: mod_base = OTHER; note = 2'-O-methylguanosine-3'-phosphate
  modified_base 13: mod_base = OTHER; note = 2'-O-methylguanosine-3'-phosphate
  modified_base 14: mod_base = OTHER; note = 2'-deoxy-2'-fluorocytidine-3'-phosphate
  modified_base 15: mod_base = OTHER; note = 2'-O-methyluridine-3'-phosphate
  modified_base 16: mod_base = OTHER; note = 2'-deoxy-2'-fluoroguanosine-3'-phosphate
  modified_base 17: mod_base = OTHER; note = 2'-O-methylguanosine-3'-phosphate
  modified_base 18: mod_base = OTHER; note = 2'-O-methyluridine-3'-phosphate
  modified_base 19: mod_base = OTHER; note = 2'-O-methylguanosine-3'-phosphate
  modified_base 20: mod_base = OTHER; note = 2'-O-methyladenosine-3'-phosphate
  modified_base 21: mod_base = OTHER; note = 2'-O-methyladenosine-3'-phosphorothioate
  modified_base 22: mod_base = OTHER; note = 2'-O-methylguanosine-3'-phosphorothioate
  modified_base 23: mod_base = OTHER; note = 2'-O-methyladenosine
ttctgaaagaaggctggtgaaga

SEQ ID NO: 895 - RNA, 21 nt, synthetic construct
  source 1..21: mol_type = other RNA
  modified_base 1: mod_base = OTHER; note = 2'-O-methyluridine-3'-phosphorothioate
  modified_base 2: mod_base = OTHER; note = 2'-O-methylcytidine-3'-phosphorothioate
  modified_base 3: mod_base = OTHER; note = 2'-O-methyluridine-3'-phosphate
  modified_base 4: mod_base = OTHER; note = 2'-O-methyluridine-3'-phosphate
  modified_base 5: mod_base = OTHER; note = 2'-O-methyluridine-3'-phosphate
  modified_base 6: mod_base = OTHER; note = 2'-O-methyluridine-3'-phosphate
  modified_base 7: mod_base = OTHER; note = 2'-deoxy-2'-fluorocytidine-3'-phosphate
  modified_base 8: mod_base = OTHER; note = 2'-O-methyluridine-3'-phosphate
  modified_base 9: mod_base = OTHER; note = 2'-deoxy-2'-fluorocytidine-3'-phosphate
  modified_base 10: mod_base = OTHER; note = 2'-deoxy-2'-fluorocytidine-3'-phosphate
  modified_base 11: mod_base = OTHER; note = 2'-deoxy-2'-fluorouridine-3'-phosphate
  modified_base 12: mod_base = OTHER; note = 2'-O-methyladenosine-3'-phosphate
  modified_base 13: mod_base = OTHER; note = 2'-O-methylcytidine-3'-phosphate
  modified_base 14: mod_base = OTHER; note = 2'-O-methyladenosine-3'-phosphate
  modified_base 15: mod_base = OTHER; note = 2'-O-methylguanosine-3'-phosphate
  modified_base 16: mod_base = OTHER; note = 2'-O-methyluridine-3'-phosphate
  modified_base 17: mod_base = OTHER; note = 2'-O-methylguanosine-3'-phosphate
  modified_base 18: mod_base = OTHER; note = 2'-O-methyluridine-3'-phosphate
  modified_base 19: mod_base = OTHER; note = 2'-O-methylcytidine-3'-phosphate
  modified_base 20: mod_base = OTHER; note = 2'-O-methyladenosine-3'-phosphate
  modified_base 21: mod_base = OTHER; note = 2'-O-methyladenosine-3'-phosphate ((2S,4R)-1-[29-[[2-(acetylamino)-2-deoxy-beta-D-galactopyra nosyl]oxy]-14,14-bis[[3-[[3-[[5-[[2-(acetylamino)-2-deoxy-b eta-D-galactopyranosyl]oxy]-1-oxopentyl]amino]propyl]amino] -3-oxopropoxy]methyl]-1,12,19,25-tetraoxo-16-oxa-13,20,24-t riazanonacos-1-yl]-4-hydroxy-2-pyrrolidinyl)methyl ester
tcttttctcctacagtgtcaa

SEQ ID NO: 896 - RNA, 23 nt, synthetic construct
  source 1..23: mol_type = other RNA
  modified_base 1: mod_base = OTHER; note = 2'-O-methyluridine-3'-phosphorothioate 5'-(E)-Vinylphosphonate
  modified_base 2: mod_base = OTHER; note = 2'-deoxy-2'-fluorouridine-3'-phosphorothioate
  modified_base 3: mod_base = OTHER; note = 2'-O-methylguanosine-3'-phosphate
  modified_base 4: mod_base = OTHER; note = 2'-O-methyladenosine-3'-phosphate
  modified_base 5: mod_base = OTHER; note = 2'-O-methylcytidine-3'-phosphate
  modified_base 6: mod_base = OTHER; note = 2'-deoxy-2'-fluoroadenosine-3'-phosphate
  modified_base 7: mod_base = OTHER; note = 2'-O-methylcytidine-3'-phosphate
  modified_base 8: mod_base = OTHER; note = 2'-deoxy-2'-fluorouridine-3'-phosphate
  modified_base 9: mod_base = OTHER; note = 2'-deoxy-2'-fluoroguanosine-3'-phosphate
  modified_base 10: mod_base = OTHER; note = 2'-O-methyluridine-3'-phosphate
  modified_base 11: mod_base = OTHER; note = 2'-O-methyladenosine-3'-phosphate
  modified_base 12: mod_base = OTHER; note = 2'-O-methylguanosine-3'-phosphate
  modified_base 13: mod_base = OTHER; note = 2'-O-methylguanosine-3'-phosphate
  modified_base 14: mod_base = OTHER; note = 2'-deoxy-2'-fluoroadenosine-3'-phosphate
  modified_base 15: mod_base = OTHER; note = 2'-O-methylguanosine-3'-phosphate
  modified_base 16: mod_base = OTHER; note = 2'-deoxy-2'-fluoroadenosine-3'-phosphate
  modified_base 17: mod_base = OTHER; note = 2'-O-methyladenosine-3'-phosphate
  modified_base 18: mod_base = OTHER; note = 2'-O-methyladenosine-3'-phosphate
  modified_base 19: mod_base = OTHER; note = 2'-O-methyladenosine-3'-phosphate
  modified_base 20: mod_base = OTHER; note = 2'-O-methylguanosine-3'-phosphate
  modified_base 21: mod_base = OTHER; note = 2'-O-methyladenosine-3'-phosphorothioate
  modified_base 22: mod_base = OTHER; note = 2'-O-methylcytidine-3'-phosphorothioate
  modified_base 23: mod_base = OTHER; note = 2'-O-methyluridine
ttgacactgtaggagaaaagact

SEQ ID NO: 897 - RNA, 21 nt, synthetic construct
  source 1..21: mol_type = other RNA
  modified_base 1: mod_base = OTHER; note = 2'-O-methyladenosine-3'-phosphorothioate
  modified_base 2: mod_base = OTHER; note = 2'-O-methylguanosine-3'-phosphorothioate
  modified_base 3: mod_base = OTHER; note = 2'-O-methyluridine-3'-phosphate
  modified_base 4: mod_base = OTHER; note = 2'-O-methylguanosine-3'-phosphate
  modified_base 5: mod_base = OTHER; note = 2'-O-methyladenosine-3'-phosphate
  modified_base 6: mod_base = OTHER; note = 2'-O-methylcytidine-3'-phosphate
  modified_base 7: mod_base = OTHER; note = 2'-deoxy-2'-fluorocytidine-3'-phosphate
  modified_base 8: mod_base = OTHER; note = 2'-O-methyluridine-3'-phosphate
  modified_base 9: mod_base = OTHER; note = 2'-deoxy-2'-fluorouridine-3'-phosphate
  modified_base 10: mod_base = OTHER; note = 2'-deoxy-2'-fluorouridine-3'-phosphate
  modified_base 11: mod_base = OTHER; note = 2'-deoxy-2'-fluorocytidine-3'-phosphate
  modified_base 12: mod_base = OTHER; note = 2'-O-methylcytidine-3'-phosphate
  modified_base 13: mod_base = OTHER; note = 2'-O-methylcytidine-3'-phosphate
  modified_base 14: mod_base = OTHER; note = 2'-O-methylguanosine-3'-phosphate
  modified_base 15: mod_base = OTHER; note = 2'-O-methylcytidine-3'-phosphate
  modified_base 16: mod_base = OTHER; note = 2'-O-methyluridine-3'-phosphate
  modified_base 17: mod_base = OTHER; note = 2'-O-methylcytidine-3'-phosphate
  modified_base 18: mod_base = OTHER; note = 2'-O-methyluridine-3'-phosphate
  modified_base 19: mod_base = OTHER; note = 2'-O-methylcytidine-3'-phosphate
  modified_base 20: mod_base = OTHER; note = 2'-O-methyladenosine-3'-phosphate
  modified_base 21: mod_base = OTHER; note = 2'-O-methyladenosine-3'-phosphate ((2S,4R)-1-[29-[[2-(acetylamino)-2-deoxy-beta-D-galactopyra nosyl]oxy]-14,14-bis[[3-[[3-[[5-[[2-(acetylamino)-2-deoxy-b eta-D-galactopyranosyl]oxy]-1-oxopentyl]amino]propyl]amino] -3-oxopropoxy]methyl]-1,12,19,25-tetraoxo-16-oxa-13,20,24-t riazanonacos-1-yl]-4-hydroxy-2-pyrrolidinyl)methyl ester
agtgacctttcccgctctcaa

SEQ ID NO: 898 - RNA, 23 nt, synthetic construct
  source 1..23: mol_type = other RNA
  modified_base 1: mod_base = OTHER; note = 2'-O-methyluridine-3'-phosphorothioate 5'-(E)-Vinylphosphonate
  modified_base 2: mod_base = OTHER; note = 2'-deoxy-2'-fluorouridine-3'-phosphorothioate
  modified_base 3: mod_base = OTHER; note = 2'-O-methylguanosine-3'-phosphate
  modified_base 4: mod_base = OTHER; note = 2'-O-methyladenosine-3'-phosphate
  modified_base 5: mod_base = OTHER; note = 2'-O-methylguanosine-3'-phosphate
  modified_base 6: mod_base = OTHER; note = 2'-deoxy-2'-fluoroadenosine-3'-phosphate
  modified_base 7: mod_base = OTHER; note = 2'-O-methylguanosine-3'-phosphate
  modified_base 8: mod_base = OTHER; note = 2'-deoxy-2'-fluorocytidine-3'-phosphate
  modified_base 9: mod_base = OTHER; note = 2'-deoxy-2'-fluoroguanosine-3'-phosphate
  modified_base 10: mod_base = OTHER; note = 2'-O-methylguanosine-3'-phosphate
  modified_base 11: mod_base = OTHER; note = 2'-O-methylguanosine-3'-phosphate
  modified_base 12: mod_base = OTHER; note = 2'-O-methyladenosine-3'-phosphate
  modified_base 13: mod_base = OTHER; note = 2'-O-methyladenosine-3'-phosphate
  modified_base 14: mod_base = OTHER; note = 2'-deoxy-2'-fluoroadenosine-3'-phosphate
  modified_base 15: mod_base = OTHER; note = 2'-O-methylguanosine-3'-phosphate
  modified_base 16: mod_base = OTHER; note = 2'-deoxy-2'-fluoroguanosine-3'-phosphate
  modified_base 17: mod_base = OTHER; note = 2'-O-methyluridine-3'-phosphate
  modified_base 18: mod_base = OTHER; note = 2'-O-methylcytidine-3'-phosphate
  modified_base 19: mod_base = OTHER; note = 2'-O-methyladenosine-3'-phosphate
  modified_base 20: mod_base = OTHER; note = 2'-O-methylcytidine-3'-phosphate
  modified_base 21: mod_base = OTHER; note = 2'-O-methyluridine-3'-phosphorothioate
  modified_base 22: mod_base = OTHER; note = 2'-O-methylguanosine-3'-phosphorothioate
  modified_base 23: mod_base = OTHER; note = 2'-O-methyluridine
ttgagagcgggaaaggtcactgt

SEQ ID NO: 899 - RNA, 21 nt, synthetic construct
  source 1..21: mol_type = other RNA
  modified_base 1: mod_base = OTHER; note = 2'-O-methyladenosine-3'-phosphorothioate
  modified_base 2: mod_base = OTHER; note = 2'-O-methylguanosine-3'-phosphorothioate
  modified_base 3: mod_base = OTHER; note = 2'-O-methyladenosine-3'-phosphate
  modified_base 4: mod_base = OTHER; note = 2'-O-methylguanosine-3'-phosphate
  modified_base 5: mod_base = OTHER; note = 2'-O-methyluridine-3'-phosphate
  modified_base 6: mod_base = OTHER; note = 2'-O-methylcytidine-3'-phosphate
  modified_base 7: mod_base = OTHER; note = 2'-deoxy-2'-fluorouridine-3'-phosphate
  modified_base 8: mod_base = OTHER; note = 2'-O-methyluridine-3'-phosphate
  modified_base 9: mod_base = OTHER; note = 2'-deoxy-2'-fluorouridine-3'-phosphate
  modified_base 10: mod_base = OTHER; note = 2'-deoxy-2'-fluorouridine-3'-phosphate
  modified_base 11: mod_base = OTHER; note = 2'-deoxy-2'-fluorocytidine-3'-phosphate
  modified_base 12: mod_base = OTHER; note = 2'-O-methyluridine-3'-phosphate
  modified_base 13: mod_base = OTHER; note = 2'-O-methylcytidine-3'-phosphate
  modified_base 14: mod_base = OTHER; note = 2'-O-methylcytidine-3'-phosphate
  modified_base 15: mod_base = OTHER; note = 2'-O-methyluridine-3'-phosphate
  modified_base 16: mod_base = OTHER; note = 2'-O-methyladenosine-3'-phosphate
  modified_base 17: mod_base = OTHER; note = 2'-O-methylcytidine-3'-phosphate
  modified_base 18: mod_base = OTHER; note = 2'-O-methyladenosine-3'-phosphate
  modified_base 19: mod_base = OTHER; note = 2'-O-methylguanosine-3'-phosphate
  modified_base 20: mod_base = OTHER; note = 2'-O-methyluridine-3'-phosphate
  modified_base 21: mod_base = OTHER; note = 2'-O-methyladenosine-3'-phosphate ((2S,4R)-1-[29-[[2-(acetylamino)-2-deoxy-beta-D-galactopyra nosyl]oxy]-14,14-bis[[3-[[3-[[5-[[2-(acetylamino)-2-deoxy-b eta-D-galactopyranosyl]oxy]-1-oxopentyl]amino]propyl]amino] -3-oxopropoxy]methyl]-1,12,19,25-tetraoxo-16-oxa-13,20,24-t riazanonacos-1-yl]-4-hydroxy-2-pyrrolidinyl)methyl ester
agagtcttttctcctacagta

SEQ ID NO: 900 - RNA, 23 nt, synthetic construct
  source 1..23: mol_type = other RNA
  modified_base 1: mod_base = OTHER; note = 2'-O-methyluridine-3'-phosphorothioate 5'-(E)-Vinylphosphonate
  modified_base 2: mod_base = OTHER; note = 2'-deoxy-2'-fluoroadenosine-3'-phosphorothioate
  modified_base 3: mod_base = OTHER; note = 2'-O-methylcytidine-3'-phosphate
  modified_base 4: mod_base = OTHER; note = 2'-O-methyluridine-3'-phosphate
  modified_base 5: mod_base = OTHER; note = 2'-O-methylguanosine-3'-phosphate
  modified_base 6: mod_base = OTHER; note = 2'-deoxy-2'-fluorouridine-3'-phosphate
  modified_base 7: mod_base = OTHER; note = 2'-O-methyladenosine-3'-phosphate
  modified_base 8: mod_base = OTHER; note = 2'-deoxy-2'-fluoroguanosine-3'-phosphate
  modified_base 9: mod_base = OTHER; note = 2'-deoxy-2'-fluoroguanosine-3'-phosphate
  modified_base 10: mod_base = OTHER; note = 2'-O-methyladenosine-3'-phosphate
  modified_base 11: mod_base = OTHER; note = 2'-O-methylguanosine-3'-phosphate
  modified_base 12: mod_base = OTHER; note = 2'-O-methyladenosine-3'-phosphate
  modified_base 13: mod_base = OTHER; note = 2'-O-methyladenosine-3'-phosphate
  modified_base 14: mod_base = OTHER; note = 2'-deoxy-2'-fluoroadenosine-3'-phosphate
  modified_base 15: mod_base = OTHER; note = 2'-O-methyladenosine-3'-phosphate
  modified_base 16: mod_base = OTHER; note = 2'-deoxy-2'-fluoroguanosine-3'-phosphate
  modified_base 17: mod_base = OTHER; note = 2'-O-methyladenosine-3'-phosphate
  modified_base 18: mod_base = OTHER; note = 2'-O-methylcytidine-3'-phosphate
  modified_base 19: mod_base = OTHER; note = 2'-O-methyluridine-3'-phosphate
  modified_base 20: mod_base = OTHER; note = 2'-O-methylcytidine-3'-phosphate
  modified_base 21: mod_base = OTHER; note = 2'-O-methyluridine-3'-phosphorothioate
  modified_base 22: mod_base = OTHER; note = 2'-O-methylguanosine-3'-phosphorothioate
  modified_base 23: mod_base = OTHER; note = 2'-O-methyladenosine
tactgtaggagaaaagactctga

SEQ ID NO: 901 - RNA, 21 nt, synthetic construct
  source 1..21: mol_type = other RNA
  modified_base 1: mod_base = OTHER; note = 2'-O-methylcytidine-3'-phosphorothioate
  modified_base 2: mod_base = OTHER; note = 2'-O-methyluridine-3'-phosphorothioate
  modified_base 3: mod_base = OTHER; note = 2'-O-methylcytidine-3'-phosphate
  modified_base 4: mod_base = OTHER; note = 2'-O-methyluridine-3'-phosphate
  modified_base 5: mod_base = OTHER; note = 2'-O-methylguanosine-3'-phosphate
  modified_base 6: mod_base = OTHER; note = 2'-O-methylcytidine-3'-phosphate
  modified_base 7: mod_base = OTHER; note = 2'-deoxy-2'-fluoroadenosine-3'-phosphate
  modified_base 8: mod_base = OTHER; note = 2'-O-methylguanosine-3'-phosphate
  modified_base 9: mod_base = OTHER; note = 2'-deoxy-2'-fluoroadenosine-3'-phosphate
  modified_base 10: mod_base = OTHER; note = 2'-deoxy-2'-fluoroadenosine-3'-phosphate
  modified_base 11: mod_base = OTHER; note = 2'-deoxy-2'-fluorouridine-3'-phosphate
  modified_base 12: mod_base = OTHER; note = 2'-O-methyluridine-3'-phosphate
  modified_base 13: mod_base = OTHER; note = 2'-O-methyluridine-3'-phosphate
  modified_base 14: mod_base = OTHER; note = 2'-O-methyluridine-3'-phosphate
  modified_base 15: mod_base = OTHER; note = 2'-O-methyladenosine-3'-phosphate
  modified_base 16: mod_base = OTHER; note = 2'-O-methylcytidine-3'-phosphate
  modified_base 17: mod_base = OTHER; note = 2'-O-methyladenosine-3'-phosphate
  modified_base 18: mod_base = OTHER; note = 2'-O-methylcytidine-3'-phosphate
  modified_base 19: mod_base = OTHER; note = 2'-O-methyluridine-3'-phosphate
  modified_base 20: mod_base = OTHER; note = 2'-O-methylguanosine-3'-phosphate
  modified_base 21: mod_base = OTHER; note = 2'-O-methyladenosine-3'-phosphate ((2S,4R)-1-[29-[[2-(acetylamino)-2-deoxy-beta-D-galactopyra nosyl]oxy]-14,14-bis[[3-[[3-[[5-[[2-(acetylamino)-2-deoxy-b eta-D-galactopyranosyl]oxy]-1-oxopentyl]amino]propyl]amino] -3-oxopropoxy]methyl]-1,12,19,25-tetraoxo-16-oxa-13,20,24-t riazanonacos-1-yl]-4-hydroxy-2-pyrrolidinyl)methyl ester
ctctgcagaattttacactga

SEQ ID NO: 902 - RNA, 23 nt, synthetic construct
  source 1..23: mol_type = other RNA
  modified_base 1: mod_base = OTHER; note = 2'-O-methyluridine-3'-phosphorothioate 5'-(E)-Vinylphosphonate
  modified_base 2: mod_base = OTHER; note = 2'-deoxy-2'-fluorocytidine-3'-phosphorothioate
  modified_base 3: mod_base = OTHER; note = 2'-O-methyladenosine-3'-phosphate
  modified_base 4: mod_base = OTHER; note = 2'-O-methylguanosine-3'-phosphate
  modified_base 5: mod_base = OTHER; note = 2'-O-methyluridine-3'-phosphate
  modified_base 6: mod_base = OTHER; note = 2'-deoxy-2'-fluoroguanosine-3'-phosphate
  modified_base 7: mod_base = OTHER; note = 2'-O-methyluridine-3'-phosphate
  modified_base 8: mod_base = OTHER; note = 2'-deoxy-2'-fluoroadenosine-3'-phosphate
  modified_base 9: mod_base = OTHER; note = 2'-deoxy-2'-fluoroadenosine-3'-phosphate
  modified_base 10: mod_base = OTHER; note = 2'-O-methyladenosine-3'-phosphate
  modified_base 11: mod_base = OTHER; note = 2'-O-methyladenosine-3'-phosphate
  modified_base 12: mod_base = OTHER; note = 2'-O-methyluridine-3'-phosphate
  modified_base 13: mod_base = OTHER; note = 2'-O-methyluridine-3'-phosphate
  modified_base 14: mod_base = OTHER; note = 2'-deoxy-2'-fluorocytidine-3'-phosphate
  modified_base 15: mod_base = OTHER; note = 2'-O-methyluridine-3'-phosphate
  modified_base 16: mod_base = OTHER; note = 2'-deoxy-2'-fluoroguanosine-3'-phosphate
  modified_base 17: mod_base = OTHER; note = 2'-O-methylcytidine-3'-phosphate
  modified_base 18: mod_base = OTHER; note = 2'-O-methyladenosine-3'-phosphate
  modified_base 19: mod_base = OTHER; note = 2'-O-methylguanosine-3'-phosphate
  modified_base 20: mod_base = OTHER; note = 2'-O-methyladenosine-3'-phosphate
  modified_base 21: mod_base = OTHER; note = 2'-O-methylguanosine-3'-phosphorothioate
  modified_base 22: mod_base = OTHER; note = 2'-O-methylguanosine-3'-phosphorothioate
  modified_base 23: mod_base = OTHER; note = 2'-O-methyluridine
tcagtgtaaaattctgcagaggt

SEQ ID NO: 903 - RNA, 21 nt, synthetic construct
  source 1..21: mol_type = other RNA
  modified_base 1: mod_base = OTHER; note = 2'-O-methyluridine-3'-phosphorothioate
  modified_base 2: mod_base = OTHER; note = 2'-O-methylguanosine-3'-phosphorothioate
  modified_base 3: mod_base = OTHER; note = 2'-O-methyluridine-3'-phosphate
  modified_base 4: mod_base = OTHER; note = 2'-O-methylcytidine-3'-phosphate
  modified_base 5: mod_base = OTHER; note = 2'-O-methyluridine-3'-phosphate
  modified_base 6: mod_base = OTHER; note = 2'-O-methyluridine-3'-phosphate
  modified_base 7: mod_base = OTHER; note = 2'-deoxy-2'-fluorocytidine-3'-phosphate
  modified_base 8: mod_base = OTHER; note = 2'-O-methyladenosine-3'-phosphate
  modified_base 9: mod_base = OTHER; note = 2'-deoxy-2'-fluorocytidine-3'-phosphate
  modified_base 10: mod_base = OTHER; note = 2'-deoxy-2'-fluorocytidine-3'-phosphate
  modified_base 11: mod_base = OTHER; note = 2'-deoxy-2'-fluoroadenosine-3'-phosphate
  modified_base 12: mod_base = OTHER; note = 2'-O-methylguanosine-3'-phosphate
  modified_base 13: mod_base = OTHER; note = 2'-O-methylcytidine-3'-phosphate
  modified_base 14: mod_base = OTHER; note = 2'-O-methylcytidine-3'-phosphate
  modified_base 15: mod_base = OTHER; note = 2'-O-methyluridine-3'-phosphate
  modified_base 16: mod_base = OTHER; note = 2'-O-methyluridine-3'-phosphate
  modified_base 17: mod_base = OTHER; note = 2'-O-methylcytidine-3'-phosphate
  modified_base 18: mod_base = OTHER; note = 2'-O-methyluridine-3'-phosphate
  modified_base 19: mod_base = OTHER; note = 2'-O-methyluridine-3'-phosphate
  modified_base 20: mod_base = OTHER; note = 2'-O-methyluridine-3'-phosphate
  modified_base 21: mod_base = OTHER; note = 2'-O-methyladenosine-3'-phosphate ((2S,4R)-1-[29-[[2-(acetylamino)-2-deoxy-beta-D-galactopyra nosyl]oxy]-14,14-bis[[3-[[3-[[5-[[2-(acetylamino)-2-deoxy-b eta-D-galactopyranosyl]oxy]-1-oxopentyl]amino]propyl]amino] -3-oxopropoxy]methyl]-1,12,19,25-tetraoxo-16-oxa-13,20,24-t riazanonacos-1-yl]-4-hydroxy-2-pyrrolidinyl)methyl ester
tgtcttcaccagccttcttta

SEQ ID NO: 904 - RNA, 23 nt, synthetic construct
  source 1..23: mol_type = other RNA
  modified_base 1: mod_base = OTHER; note = 2'-O-methyluridine-3'-phosphorothioate 5'-(E)-Vinylphosphonate
  modified_base 2: mod_base = OTHER; note = 2'-deoxy-2'-fluoroadenosine-3'-phosphorothioate
  modified_base 3: mod_base = OTHER; note = 2'-O-methyladenosine-3'-phosphate
  modified_base 4: mod_base = OTHER; note = 2'-O-methyladenosine-3'-phosphate
  modified_base 5: mod_base = OTHER; note = 2'-O-methylguanosine-3'-phosphate
  modified_base 6: mod_base = OTHER; note = 2'-deoxy-2'-fluoroadenosine-3'-phosphate
  modified_base 7: mod_base = OTHER; note = 2'-O-methyladenosine-3'-phosphate
  modified_base 8: mod_base = OTHER; note = 2'-deoxy-2'-fluoroguanosine-3'-phosphate
  modified_base 9: mod_base = OTHER; note = 2'-deoxy-2'-fluoroguanosine-3'-phosphate
  modified_base 10: mod_base = OTHER; note = 2'-O-methylcytidine-3'-phosphate
  modified_base 11: mod_base = OTHER; note = 2'-O-methyluridine-3'-phosphate
  modified_base 12: mod_base = OTHER; note = 2'-O-methylguanosine-3'-phosphate
  modified_base 13: mod_base = OTHER; note = 2'-O-methylguanosine-3'-phosphate
  modified_base 14: mod_base = OTHER; note = 2'-deoxy-2'-fluorouridine-3'-phosphate
  modified_base 15: mod_base = OTHER; note = 2'-O-methylguanosine-3'-phosphate
  modified_base 16: mod_base = OTHER; note = 2'-deoxy-2'-fluoroadenosine-3'-phosphate
  modified_base 17: mod_base = OTHER; note = 2'-O-methyladenosine-3'-phosphate
  modified_base 18: mod_base = OTHER; note = 2'-O-methylguanosine-3'-phosphate
  modified_base 19: mod_base = OTHER; note = 2'-O-methyladenosine-3'-phosphate
  modified_base 20: mod_base = OTHER; note = 2'-O-methylcytidine-3'-phosphate
  modified_base 21: mod_base = OTHER; note = 2'-O-methyladenosine-3'-phosphorothioate
  modified_base 22: mod_base = OTHER; note = 2'-O-methyladenosine-3'-phosphorothioate
  modified_base 23: mod_base = OTHER; note = 2'-O-methyladenosine
taaagaaggctggtgaagacaaa

SEQ ID NO: 905 - RNA, 21 nt, synthetic construct
  source 1..21: mol_type = other RNA
  modified_base 1: mod_base = OTHER; note = 2'-O-methyladenosine-3'-phosphorothioate
  modified_base 2: mod_base = OTHER; note = 2'-O-methylguanosine-3'-phosphorothioate
  modified_base 3: mod_base = OTHER; note = 2'-O-methylcytidine-3'-phosphate
  modified_base 4: mod_base = OTHER; note = 2'-O-methylcytidine-3'-phosphate
  modified_base 5: mod_base = OTHER; note = 2'-O-methyluridine-3'-phosphate
  modified_base 6: mod_base = OTHER; note = 2'-O-methyluridine-3'-phosphate
  modified_base 7: mod_base = OTHER; note = 2'-deoxy-2'-fluorocytidine-3'-phosphate
  modified_base 8: mod_base = OTHER; note = 2'-O-methyluridine-3'-phosphate
  modified_base 9: mod_base = OTHER; note = 2'-deoxy-2'-fluorouridine-3'-phosphate
  modified_base 10: mod_base = OTHER; note = 2'-deoxy-2'-fluorouridine-3'-phosphate
  modified_base 11: mod_base = OTHER; note = 2'-deoxy-2'-fluorocytidine-3'-phosphate
  modified_base 12: mod_base = OTHER; note = 2'-O-methyladenosine-3'-phosphate
  modified_base 13: mod_base = OTHER; note = 2'-O-methylguanosine-3'-phosphate
  modified_base 14: mod_base = OTHER; note = 2'-O-methyladenosine-3'-phosphate
  modified_base 15: mod_base = OTHER; note = 2'-O-methyladenosine-3'-phosphate
  modified_base 16: mod_base = OTHER; note = 2'-O-methylguanosine-3'-phosphate
  modified_base 17: mod_base = OTHER; note = 2'-O-methylcytidine-3'-phosphate
  modified_base 18: mod_base = OTHER; note = 2'-O-methylcytidine-3'-phosphate
  modified_base 19: mod_base = OTHER; note = 2'-O-methyluridine-3'-phosphate
  modified_base 20: mod_base = OTHER; note = 2'-O-methyluridine-3'-phosphate
  modified_base 21: mod_base = OTHER; note = 2'-O-methyladenosine-3'-phosphate ((2S,4R)-1-[29-[[2-(acetylamino)-2-deoxy-beta-D-galactopyra nosyl]oxy]-14,14-bis[[3-[[3-[[5-[[2-(acetylamino)-2-deoxy-b eta-D-galactopyranosyl]oxy]-1-oxopentyl]amino]propyl]amino] -3-oxopropoxy]methyl]-1,12,19,25-tetraoxo-16-oxa-13,20,24-t riazanonacos-1-yl]-4-hydroxy-2-pyrrolidinyl)methyl ester
agccttctttcagaagcctta

SEQ ID NO: 906 - RNA, 23 nt, synthetic construct
  source 1..23: mol_type = other RNA
  modified_base 1: mod_base = OTHER; note = 2'-O-methyluridine-3'-phosphorothioate 5'-(E)-Vinylphosphonate
  modified_base 2: mod_base = OTHER; note = 2'-deoxy-2'-fluoroadenosine-3'-phosphorothioate
  modified_base 3: mod_base = OTHER; note = 2'-O-methyladenosine-3'-phosphate
  modified_base 4: mod_base = OTHER; note = 2'-O-methylguanosine-3'-phosphate
  modified_base 5: mod_base = OTHER; note = 2'-O-methylguanosine-3'-phosphate
  modified_base 6: mod_base = OTHER; note = 2'-deoxy-2'-fluorocytidine-3'-phosphate
  modified_base 7: mod_base = OTHER; note = 2'-O-methyluridine-3'-phosphate
  modified_base 8: mod_base = OTHER; note = 2'-deoxy-2'-fluorouridine-3'-phosphate
  modified_base 9: mod_base = OTHER; note = 2'-deoxy-2'-fluorocytidine-3'-phosphate
  modified_base 10: mod_base = OTHER; note = 2'-O-methyluridine-3'-phosphate
  modified_base 11: mod_base = OTHER; note = 2'-O-methylguanosine-3'-phosphate
  modified_base 12: mod_base = OTHER; note = 2'-O-methyladenosine-3'-phosphate
  modified_base 13: mod_base = OTHER; note = 2'-O-methyladenosine-3'-phosphate
  modified_base 14: mod_base = OTHER; note = 2'-deoxy-2'-fluoroadenosine-3'-phosphate
  modified_base 15: mod_base = OTHER; note = 2'-O-methylguanosine-3'-phosphate
  modified_base 16: mod_base = OTHER; note = 2'-deoxy-2'-fluoroadenosine-3'-phosphate
  modified_base 17: mod_base = OTHER; note = 2'-O-methyladenosine-3'-phosphate
  modified_base 18: mod_base = OTHER; note = 2'-O-methylguanosine-3'-phosphate
  modified_base 19: mod_base = OTHER; note = 2'-O-methylguanosine-3'-phosphate
  modified_base 20: mod_base = OTHER; note = 2'-O-methylcytidine-3'-phosphate
  modified_base 21: mod_base = OTHER; note = 2'-O-methyluridine-3'-phosphorothioate
  modified_base 22: mod_base = OTHER; note = 2'-O-methylguanosine-3'-phosphorothioate
  modified_base 23: mod_base = OTHER; note = 2'-O-methylguanosine
taaggcttctgaaagaaggctgg

SEQ ID NO: 907 - RNA, 21 nt, synthetic construct
  source 1..21: mol_type = other RNA
  modified_base 1: mod_base = OTHER; note = 2'-O-methyladenosine-3'-phosphorothioate
  modified_base 2: mod_base = OTHER; note = 2'-O-methyladenosine-3'-phosphorothioate
  modified_base 3: mod_base = OTHER; note = 2'-O-methyluridine-3'-phosphate
  modified_base 4: mod_base = OTHER; note = 2'-O-methylguanosine-3'-phosphate
  modified_base 5: mod_base = OTHER; note = 2'-O-methylguanosine-3'-phosphate
  modified_base 6: mod_base = OTHER; note = 2'-O-methyladenosine-3'-phosphate
  modified_base 7: mod_base = OTHER; note = 2'-deoxy-2'-fluoroadenosine-3'-phosphate
  modified_base 8: mod_base = OTHER; note = 2'-O-methyladenosine-3'-phosphate
  modified_base 9: mod_base = OTHER; note = 2'-deoxy-2'-fluoroguanosine-3'-phosphate
  modified_base 10: mod_base = OTHER; note = 2'-deoxy-2'-fluorocytidine-3'-phosphate
  modified_base 11: mod_base = OTHER; note = 2'-deoxy-2'-fluorocytidine-3'-phosphate
  modified_base 12: mod_base = OTHER; note = 2'-O-methyluridine-3'-phosphate
  modified_base 13: mod_base = OTHER; note = 2'-O-methyluridine-3'-phosphate
  modified_base 14: mod_base = OTHER; note = 2'-O-methylguanosine-3'-phosphate
  modified_base 15: mod_base = OTHER; note = 2'-O-methylguanosine-3'-phosphate
  modified_base 16: mod_base = OTHER; note = 2'-O-methylguanosine-3'-phosphate
  modified_base 17: mod_base = OTHER; note = 2'-O-methyluridine-3'-phosphate
  modified_base 18: mod_base = OTHER; note = 2'-O-methyladenosine-3'-phosphate
  modified_base 19: mod_base = OTHER; note = 2'-O-methyladenosine-3'-phosphate
  modified_base 20: mod_base = OTHER; note = 2'-O-methyladenosine-3'-phosphate
  modified_base 21: mod_base = OTHER; note = 2'-O-methyladenosine-3'-phosphate ((2S,4R)-1-[29-[[2-(acetylamino)-2-deoxy-beta-D-galactopyra nosyl]oxy]-14,14-bis[[3-[[3-[[5-[[2-(acetylamino)-2-deoxy-b eta-D-galactopyranosyl]oxy]-1-oxopentyl]amino]propyl]amino] -3-oxopropoxy]methyl]-1,12,19,25-tetraoxo-16-oxa-13,20,24-t riazanonacos-1-yl]-4-hydroxy-2-pyrrolidinyl)methyl ester
aatggaaagccttgggtaaaa

SEQ ID NO: 908 - RNA, 23 nt, synthetic construct
  source 1..23: mol_type = other RNA
  modified_base 1: mod_base = OTHER; note = 2'-O-methyluridine-3'-phosphorothioate 5'-(E)-Vinylphosphonate
  modified_base 2: mod_base = OTHER; note = 2'-deoxy-2'-fluorouridine-3'-phosphorothioate
  modified_base 3: mod_base = OTHER; note = 2'-O-methyluridine-3'-phosphate
  modified_base 4: mod_base = OTHER; note = 2'-O-methyluridine-3'-phosphate
  modified_base 5: mod_base = OTHER; note = 2'-O-methyladenosine-3'-phosphate
  modified_base 6: mod_base = OTHER; note = 2'-deoxy-2'-fluorocytidine-3'-phosphate
  modified_base 7: mod_base = OTHER; note = 2'-O-methylcytidine-3'-phosphate
  modified_base 8: mod_base = OTHER; note = 2'-deoxy-2'-fluorocytidine-3'-phosphate
  modified_base 9: mod_base = OTHER; note = 2'-deoxy-2'-fluoroadenosine-3'-phosphate
  modified_base 10: mod_base = OTHER; note = 2'-O-methyladenosine-3'-phosphate
  modified_base 11: mod_base = OTHER; note = 2'-O-methylguanosine-3'-phosphate
  modified_base 12: mod_base = OTHER; note = 2'-O-methylguanosine-3'-phosphate
  modified_base 13: mod_base = OTHER; note = 2'-O-methylcytidine-3'-phosphate
  modified_base 14: mod_base = OTHER; note = 2'-deoxy-2'-fluorouridine-3'-phosphate
  modified_base 15: mod_base = OTHER; note = 2'-O-methyluridine-3'-phosphate
  modified_base 16: mod_base = OTHER; note = 2'-deoxy-2'-fluorouridine-3'-phosphate
  modified_base 17: mod_base = OTHER; note = 2'-O-methylcytidine-3'-phosphate
  modified_base 18: mod_base = OTHER; note = 2'-O-methylcytidine-3'-phosphate
  modified_base 19: mod_base = OTHER; note = 2'-O-methyladenosine-3'-phosphate
  modified_base 20: mod_base = OTHER; note = 2'-O-methyluridine-3'-phosphate
  modified_base 21: mod_base = OTHER; note = 2'-O-methyluridine-3'-phosphorothioate
  modified_base 22: mod_base = OTHER; note = 2'-O-methylguanosine-3'-phosphorothioate
  modified_base 23: mod_base = OTHER; note = 2'-O-methyladenosine
ttttacccaaggctttccattga

SEQ ID NO: 909 - RNA, 21 nt, synthetic construct
  source 1..21: mol_type = other RNA
  modified_base 1: mod_base = OTHER; note = 2'-O-methylcytidine-3'-phosphorothioate
  modified_base 2: mod_base = OTHER; note = 2'-O-methylguanosine-3'-phosphorothioate
  modified_base 3: mod_base = OTHER; note = 2'-O-methylcytidine-3'-phosphate
  modified_base 4: mod_base = OTHER; note = 2'-O-methyluridine-3'-phosphate
  modified_base 5: mod_base = OTHER; note = 2'-O-methylcytidine-3'-phosphate
  modified_base 6: mod_base = OTHER; note = 2'-O-methyluridine-3'-phosphate
  modified_base 7: mod_base = OTHER; note = 2'-deoxy-2'-fluorocytidine-3'-phosphate
  modified_base 8: mod_base = OTHER; note = 2'-O-methyladenosine-3'-phosphate
  modified_base 9: mod_base = OTHER; note = 2'-deoxy-2'-fluoroguanosine-3'-phosphate
  modified_base 10: mod_base = OTHER; note = 2'-deoxy-2'-fluoroadenosine-3'-phosphate
  modified_base 11: mod_base = OTHER; note = 2'-deoxy-2'-fluoroguanosine-3'-phosphate
  modified_base 12: mod_base = OTHER; note = 2'-O-methyluridine-3'-phosphate
  modified_base 13: mod_base = OTHER; note = 2'-O-methylcytidine-3'-phosphate
  modified_base 14: mod_base = OTHER; note = 2'-O-methyluridine-3'-phosphate
  modified_base 15: mod_base = OTHER; note = 2'-O-methyluridine-3'-phosphate
  modified_base 16: mod_base = OTHER; note = 2'-O-methyluridine-3'-phosphate
  modified_base 17: mod_base = OTHER; note = 2'-O-methyluridine-3'-phosphate
  modified_base 18: mod_base = OTHER; note = 2'-O-methylcytidine-3'-phosphate
  modified_base 19: mod_base = OTHER; note = 2'-O-methyluridine-3'-phosphate
  modified_base 20: mod_base = OTHER; note = 2'-O-methylcytidine-3'-phosphate
  modified_base 21: mod_base = OTHER; note = 2'-O-methyladenosine-3'-phosphate ((2S,4R)-1-[29-[[2-(acetylamino)-2-deoxy-beta-D-galactopyra nosyl]oxy]-14,14-bis[[3-[[3-[[5-[[2-(acetylamino)-2-deoxy-b eta-D-galactopyranosyl]oxy]-1-oxopentyl]amino]propyl]amino] -3-oxopropoxy]methyl]-1,12,19,25-tetraoxo-16-oxa-13,20,24-t riazanonacos-1-yl]-4-hydroxy-2-pyrrolidinyl)methyl ester
cgctctcagagtcttttctca

SEQ ID NO: 910 - RNA, 23 nt, synthetic construct
  source 1..23: mol_type = other RNA
  modified_base 1: mod_base = OTHER; note = 2'-O-methyluridine-3'-phosphorothioate 5'-(E)-Vinylphosphonate
  modified_base 2: mod_base = OTHER; note = 2'-deoxy-2'-fluoroguanosine-3'-phosphorothioate
  modified_base 3: mod_base = OTHER; note = 2'-O-methyladenosine-3'-phosphate
  modified_base 4: mod_base = OTHER; note = 2'-O-methylguanosine-3'-phosphate
  modified_base 5: mod_base = OTHER; note = 2'-O-methyladenosine-3'-phosphate
  modified_base 6: mod_base = OTHER; note = 2'-deoxy-2'-fluoroadenosine-3'-phosphate
  modified_base 7: mod_base = OTHER; note = 2'-O-methyladenosine-3'-phosphate
  modified_base 8: mod_base = OTHER; note = 2'-deoxy-2'-fluoroadenosine-3'-phosphate
  modified_base 9: mod_base = OTHER; note = 2'-deoxy-2'-fluoroguanosine-3'-phosphate
  modified_base 10: mod_base = OTHER; note = 2'-O-methyladenosine-3'-phosphate
  modified_base 11: mod_base = OTHER; note = 2'-O-methylcytidine-3'-phosphate
  modified_base 12: mod_base = OTHER; note = 2'-O-methyluridine-3'-phosphate
  modified_base 13: mod_base = OTHER; note = 2'-O-methylcytidine-3'-phosphate
  modified_base 14: mod_base = OTHER; note = 2'-deoxy-2'-fluorouridine-3'-phosphate
  modified_base 15: mod_base = OTHER; note = 2'-O-methylguanosine-3'-phosphate
  modified_base 16: mod_base = OTHER; note = 2'-deoxy-2'-fluoroadenosine-3'-phosphate
  modified_base 17: mod_base = OTHER; note = 2'-O-methylguanosine-3'-phosphate
  modified_base 18: mod_base = OTHER; note = 2'-O-methyladenosine-3'-phosphate
  modified_base 19: mod_base = OTHER; note = 2'-O-methylguanosine-3'-phosphate
  modified_base 20: mod_base = OTHER; note = 2'-O-methylcytidine-3'-phosphate
  modified_base 21: mod_base = OTHER; note = 2'-O-methylguanosine-3'-phosphorothioate
  modified_base 22: mod_base = OTHER; note = 2'-O-methylguanosine-3'-phosphorothioate
  modified_base 23: mod_base = OTHER; note = 2'-O-methylguanosine
tgagaaaagactctgagagcggg

SEQ ID NO: 911 - RNA, 21 nt, synthetic construct
  source 1..21: mol_type = other RNA
  modified_base 1: mod_base = OTHER; note = 2'-O-methylcytidine-3'-phosphorothioate
  modified_base 2: mod_base = OTHER; note = 2'-O-methyladenosine-3'-phosphorothioate
  modified_base 3: mod_base = OTHER; note = 2'-O-methyladenosine-3'-phosphate
  modified_base 4: mod_base = OTHER; note = 2'-O-methyluridine-3'-phosphate
  modified_base 5: mod_base = OTHER; note = 2'-O-methylguanosine-3'-phosphate
  modified_base 6: mod_base = OTHER; note = 2'-O-methylguanosine-3'-phosphate
  modified_base 7: mod_base = OTHER; note = 2'-deoxy-2'-fluoroadenosine-3'-phosphate
  modified_base 8: mod_base = OTHER; note = 2'-O-methyladenosine-3'-phosphate
  modified_base 9: mod_base = OTHER; note = 2'-deoxy-2'-fluoroadenosine-3'-phosphate
  modified_base 10: mod_base = OTHER; note = 2'-deoxy-2'-fluoroguanosine-3'-phosphate
  modified_base 11: mod_base = OTHER; note = 2'-deoxy-2'-fluorocytidine-3'-phosphate
  modified_base 12: mod_base = OTHER; note = 2'-O-methylcytidine-3'-phosphate
  modified_base 13: mod_base = OTHER; note = 2'-O-methyluridine-3'-phosphate
  modified_base 14: mod_base = OTHER; note = 2'-O-methyluridine-3'-phosphate
  modified_base 15: mod_base = OTHER; note = 2'-O-methylguanosine-3'-phosphate
  modified_base 16: mod_base = OTHER; note = 2'-O-methylguanosine-3'-phosphate
  modified_base 17: mod_base = OTHER; note = 2'-O-methylguanosine-3'-phosphate
  modified_base 18: mod_base = OTHER; note = 2'-O-methyluridine-3'-phosphate
  modified_base 19: mod_base = OTHER; note = 2'-O-methyladenosine-3'-phosphate
  modified_base 20: mod_base = OTHER; note = 2'-O-methyladenosine-3'-phosphate
  modified_base 21: mod_base = OTHER; note = 2'-O-methyladenosine-3'-phosphate ((2S,4R)-1-[29-[[2-(acetylamino)-2-deoxy-beta-D-galactopyra nosyl]oxy]-14,14-bis[[3-[[3-[[5-[[2-(acetylamino)-2-deoxy-b eta-D-galactopyranosyl]oxy]-1-oxopentyl]amino]propyl]amino] -3-oxopropoxy]methyl]-1,12,19,25-tetraoxo-16-oxa-13,20,24-t riazanonacos-1-yl]-4-hydroxy-2-pyrrolidinyl)methyl ester
caatggaaagccttgggtaaa

SEQ ID NO: 912 - RNA, 23 nt, synthetic construct
  source 1..23: mol_type = other RNA
  modified_base 1: mod_base = OTHER; note = 2'-O-methyluridine-3'-phosphorothioate 5'-(E)-Vinylphosphonate
  modified_base 2: mod_base = OTHER; note = 2'-deoxy-2'-fluorouridine-3'-phosphorothioate
  modified_base 3: mod_base = OTHER; note = 2'-O-methyluridine-3'-phosphate
  modified_base 4: mod_base = OTHER; note = 2'-O-methyladenosine-3'-phosphate
  modified_base 5: mod_base = OTHER; note = 2'-O-methylcytidine-3'-phosphate
  modified_base 6: mod_base = OTHER; note = 2'-deoxy-2'-fluorocytidine-3'-phosphate
  modified_base 7: mod_base = OTHER; note = 2'-O-methylcytidine-3'-phosphate
  modified_base 8: mod_base = OTHER; note = 2'-deoxy-2'-fluoroadenosine-3'-phosphate
  modified_base 9: mod_base = OTHER; note = 2'-deoxy-2'-fluoroadenosine-3'-phosphate
  modified_base 10: mod_base = OTHER; note = 2'-O-methylguanosine-3'-phosphate
  modified_base 11: mod_base = OTHER; note = 2'-O-methylguanosine-3'-phosphate
  modified_base 12: mod_base = OTHER; note = 2'-O-methylcytidine-3'-phosphate
  modified_base 13: mod_base = OTHER; note = 2'-O-methyluridine-3'-phosphate
  modified_base 14: mod_base = OTHER; note = 2'-deoxy-2'-fluorouridine-3'-phosphate
  modified_base 15: mod_base = OTHER; note = 2'-O-methyluridine-3'-phosphate
  modified_base 16: mod_base = OTHER; note = 2'-deoxy-2'-fluorocytidine-3'-phosphate
  modified_base 17: mod_base = OTHER; note = 2'-O-methylcytidine-3'-phosphate
  modified_base 18: mod_base = OTHER; note = 2'-O-methyladenosine-3'-phosphate
  modified_base 19: mod_base = OTHER; note = 2'-O-methyluridine-3'-phosphate
  modified_base 20: mod_base = OTHER; note = 2'-O-methyluridine-3'-phosphate
  modified_base 21: mod_base = OTHER; note = 2'-O-methylguanosine-3'-phosphorothioate
  modified_base 22: mod_base = OTHER; note = 2'-O-methyladenosine-3'-phosphorothioate
  modified_base 23: mod_base = OTHER; note = 2'-O-methylcytidine
tttacccaaggctttccattgac

SEQ ID NO: 913 - RNA, 21 nt, synthetic construct
  source 1..21: mol_type = other RNA
  modified_base 1: mod_base = OTHER; note = 2'-O-methyluridine-3'-phosphorothioate
  modified_base 2: mod_base = OTHER; note = 2'-O-methylcytidine-3'-phosphorothioate
  modified_base 3: mod_base = OTHER; note = 2'-O-methyluridine-3'-phosphate
  modified_base 4: mod_base = OTHER; note = 2'-O-methyluridine-3'-phosphate
  modified_base 5: mod_base = OTHER; note = 2'-O-methylcytidine-3'-phosphate
  modified_base 6: mod_base = OTHER; note = 2'-O-methyladenosine-3'-phosphate
  modified_base 7: mod_base = OTHER; note = 2'-deoxy-2'-fluorocytidine-3'-phosphate
  modified_base 8: mod_base = OTHER; note = 2'-O-methylcytidine-3'-phosphate
  modified_base 9: mod_base = OTHER; note = 2'-deoxy-2'-fluoroadenosine-3'-phosphate
  modified_base 10: mod_base = OTHER; note = 2'-deoxy-2'-fluoroguanosine-3'-phosphate
  modified_base 11: mod_base = OTHER; note = 2'-deoxy-2'-fluorocytidine-3'-phosphate
  modified_base 12: mod_base = OTHER; note = 2'-O-methylcytidine-3'-phosphate
  modified_base 13: mod_base = OTHER; note = 2'-O-methyluridine-3'-phosphate
  modified_base 14: mod_base = OTHER; note = 2'-O-methyluridine-3'-phosphate
  modified_base 15: mod_base = OTHER; note = 2'-O-methylcytidine-3'-phosphate
  modified_base 16: mod_base = OTHER; note = 2'-O-methyluridine-3'-phosphate
  modified_base 17: mod_base = OTHER; note = 2'-O-methyluridine-3'-phosphate
  modified_base 18: mod_base = OTHER; note = 2'-O-methyluridine-3'-phosphate
  modified_base 19: mod_base = OTHER; note = 2'-O-methylcytidine-3'-phosphate
  modified_base 20: mod_base = OTHER; note = 2'-O-methyladenosine-3'-phosphate
  modified_base 21: mod_base = OTHER; note = 2'-O-methyladenosine-3'-phosphate ((2S,4R)-1-[29-[[2-(acetylamino)-2-deoxy-beta-D-galactopyra nosyl]oxy]-14,14-bis[[3-[[3-[[5-[[2-(acetylamino)-2-deoxy-b eta-D-galactopyranosyl]oxy]-1-oxopentyl]amino]propyl]amino] -3-oxopropoxy]methyl]-1,12,19,25-tetraoxo-16-oxa-13,20,24-t riazanonacos-1-yl]-4-hydroxy-2-pyrrolidinyl)methyl ester
tcttcaccagccttctttcaa

SEQ ID NO: 914 - RNA, 23 nt, synthetic construct
  source 1..23: mol_type = other RNA
  modified_base 1: mod_base = OTHER; note = 2'-O-methyluridine-3'-phosphorothioate 5'-(E)-Vinylphosphonate
  modified_base 2: mod_base = OTHER; note = 2'-deoxy-2'-fluorouridine-3'-phosphorothioate
  modified_base 3: mod_base = OTHER; note = 2'-O-methylguanosine-3'-phosphate
  modified_base 4: mod_base = OTHER; note = 2'-O-methyladenosine-3'-phosphate
  modified_base 5: mod_base = OTHER; note = 2'-O-methyladenosine-3'-phosphate
  modified_base 6: mod_base = OTHER; note = 2'-deoxy-2'-fluoroadenosine-3'-phosphate
  modified_base 7: mod_base = OTHER; note = 2'-O-methylguanosine-3'-phosphate
  modified_base 8: mod_base = OTHER; note = 2'-deoxy-2'-fluoroadenosine-3'-phosphate
  modified_base 9: mod_base = OTHER; note = 2'-deoxy-2'-fluoroadenosine-3'-phosphate
  modified_base 10: mod_base = OTHER; note = 2'-O-methylguanosine-3'-phosphate
  modified_base 11: mod_base = OTHER; note = 2'-O-methylguanosine-3'-phosphate
  modified_base 12: mod_base = OTHER; note = 2'-O-methylcytidine-3'-phosphate
  modified_base 13: mod_base = OTHER; note = 2'-O-methyluridine-3'-phosphate
  modified_base 14: mod_base = OTHER; note = 2'-deoxy-2'-fluoroguanosine-3'-phosphate
  modified_base 15: mod_base = OTHER; note = 2'-O-methylguanosine-3'-phosphate
  modified_base 16: mod_base = OTHER; note = 2'-deoxy-2'-fluorouridine-3'-phosphate
  modified_base 17: mod_base = OTHER; note = 2'-O-methylguanosine-3'-phosphate
  modified_base 18: mod_base = OTHER; note = 2'-O-methyladenosine-3'-phosphate
  modified_base 19: mod_base = OTHER; note = 2'-O-methyladenosine-3'-phosphate
  modified_base 20: mod_base = OTHER; note = 2'-O-methylguanosine-3'-phosphate
  modified_base 21: mod_base = OTHER; note = 2'-O-methyladenosine-3'-phosphorothioate
  modified_base 22: mod_base = OTHER; note = 2'-O-methylcytidine-3'-phosphorothioate
  modified_base 23: mod_base = OTHER; note = 2'-O-methyladenosine
ttgaaagaaggctggtgaagaca

SEQ ID NO: 915 - RNA, 21 nt, synthetic construct
  source 1..21: mol_type = other RNA
  modified_base 1: mod_base = OTHER; note = 2'-O-methylcytidine-3'-phosphorothioate
  modified_base 2: mod_base = OTHER; note = 2'-O-methyluridine-3'-phosphorothioate
  modified_base 3: mod_base = OTHER; note = 2'-O-methylcytidine-3'-phosphate
  modified_base 4: mod_base = OTHER; note = 2'-O-methyluridine-3'-phosphate
  modified_base 5: mod_base = OTHER; note = 2'-O-methylcytidine-3'-phosphate
  modified_base 6: mod_base = OTHER; note = 2'-O-methyladenosine-3'-phosphate
  modified_base 7: mod_base = OTHER; note = 2'-deoxy-2'-fluoroguanosine-3'-phosphate
  modified_base 8: mod_base = OTHER; note = 2'-O-methyladenosine-3'-phosphate
  modified_base 9: mod_base = OTHER; note = 2'-deoxy-2'-fluoroguanosine-3'-phosphate
  modified_base 10: mod_base = OTHER; note = 2'-deoxy-2'-fluorouridine-3'-phosphate
  modified_base 11: mod_base = OTHER; note = 2'-deoxy-2'-fluorocytidine-3'-phosphate
  modified_base 12: mod_base = OTHER; note = 2'-O-methyluridine-3'-phosphate
  modified_base 13: mod_base = OTHER; note = 2'-O-methyluridine-3'-phosphate
  modified_base 14: mod_base = OTHER; note = 2'-O-methyluridine-3'-phosphate
  modified_base 15: mod_base = OTHER; note = 2'-O-methyluridine-3'-phosphate
  modified_base 16: mod_base = OTHER; note = 2'-O-methylcytidine-3'-phosphate
  modified_base 17: mod_base = OTHER; note = 2'-O-methyluridine-3'-phosphate
  modified_base 18: mod_base = OTHER; note = 2'-O-methylcytidine-3'-phosphate
  modified_base 19: mod_base = OTHER; note = 2'-O-methylcytidine-3'-phosphate
  modified_base 20: mod_base = OTHER; note = 2'-O-methyluridine-3'-phosphate
  modified_base 21: mod_base = OTHER; note = 2'-O-methyladenosine-3'-phosphate ((2S,4R)-1-[29-[[2-(acetylamino)-2-deoxy-beta-D-galactopyra nosyl]oxy]-14,14-bis[[3-[[3-[[5-[[2-(acetylamino)-2-deoxy-b eta-D-galactopyranosyl]oxy]-1-oxopentyl]amino]propyl]amino] -3-oxopropoxy]methyl]-1,12,19,25-tetraoxo-16-oxa-13,20,24-t riazanonacos-1-yl]-4-hydroxy-2-pyrrolidinyl)methyl ester
ctctcagagtcttttctccta

SEQ ID NO: 916 - RNA, 23 nt, synthetic construct
  source 1..23: mol_type = other RNA
  modified_base 1: mod_base = OTHER; note = 2'-O-methyluridine-3'-phosphorothioate 5'-(E)-Vinylphosphonate
  modified_base 2: mod_base = OTHER; note = 2'-deoxy-2'-fluoroadenosine-3'-phosphorothioate
  modified_base 3: mod_base = OTHER; note = 2'-O-methylguanosine-3'-phosphate
  modified_base 4: mod_base = OTHER; note = 2'-O-methylguanosine-3'-phosphate
  modified_base 5: mod_base = OTHER; note = 2'-O-methyladenosine-3'-phosphate
  modified_base 6: mod_base = OTHER; note = 2'-deoxy-2'-fluoroguanosine-3'-phosphate
  modified_base 7: mod_base = OTHER; note = 2'-O-methyladenosine-3'-phosphate
  modified_base 8: mod_base = OTHER; note = 2'-deoxy-2'-fluoroadenosine-3'-phosphate
  modified_base 9: mod_base = OTHER; note = 2'-deoxy-2'-fluoroadenosine-3'-phosphate
  modified_base 10: mod_base = OTHER; note = 2'-O-methyladenosine-3'-phosphate
  modified_base 11: mod_base = OTHER; note = 2'-O-methylguanosine-3'-phosphate
  modified_base 12: mod_base = OTHER; note = 2'-O-methyladenosine-3'-phosphate
  modified_base 13: mod_base = OTHER; note = 2'-O-methylcytidine-3'-phosphate
  modified_base 14: mod_base = OTHER; note = 2'-deoxy-2'-fluorouridine-3'-phosphate
  modified_base 15: mod_base = OTHER; note = 2'-O-methylcytidine-3'-phosphate
  modified_base 16: mod_base = OTHER; note = 2'-deoxy-2'-fluorouridine-3'-phosphate
  modified_base 17: mod_base = OTHER; note = 2'-O-methylguanosine-3'-phosphate
  modified_base 18: mod_base = OTHER; note = 2'-O-methyladenosine-3'-phosphate
  modified_base 19: mod_base = OTHER; note = 2'-O-methylguanosine-3'-phosphate
  modified_base 20: mod_base = OTHER; note = 2'-O-methyladenosine-3'-phosphate
  modified_base 21: mod_base = OTHER; note = 2'-O-methylguanosine-3'-phosphorothioate
  modified_base 22: mod_base = OTHER; note = 2'-O-methylcytidine-3'-phosphorothioate
  modified_base 23: mod_base = OTHER; note = 2'-O-methylguanosine
taggagaaaagactctgagagcg

SEQ ID NO: 917 - RNA, 21 nt, synthetic construct
  source 1..21: mol_type = other RNA
  modified_base 1: mod_base = OTHER; note = 2'-O-methylcytidine-3'-phosphorothioate
  modified_base 2: mod_base = OTHER; note = 2'-O-methyladenosine-3'-phosphorothioate
  modified_base 3: mod_base = OTHER; note = 2'-O-methylguanosine-3'-phosphate
  modified_base 4: mod_base = OTHER; note = 2'-O-methyladenosine-3'-phosphate
  modified_base 5: mod_base = OTHER; note = 2'-O-methylguanosine-3'-phosphate
  modified_base 6: mod_base = OTHER; note = 2'-O-methyladenosine-3'-phosphate
  modified_base 7: mod_base = OTHER; note = 2'-deoxy-2'-fluorocytidine-3'-phosphate
  modified_base 8: mod_base = OTHER; note = 2'-O-methyladenosine-3'-phosphate
  modified_base 9: mod_base = OTHER; note = 2'-deoxy-2'-fluoroadenosine-3'-phosphate
  modified_base 10: mod_base = OTHER; note = 2'-deoxy-2'-fluorouridine-3'-phosphate
  modified_base 11: mod_base = OTHER; note = 2'-deoxy-2'-fluoroguanosine-3'-phosphate
  modified_base 12: mod_base = OTHER; note = 2'-O-methyladenosine-3'-phosphate
  modified_base 13: mod_base = OTHER; note = 2'-O-methylguanosine-3'-phosphate
  modified_base 14: mod_base = OTHER; note = 2'-O-methylcytidine-3'-phosphate
  modified_base 15: mod_base = OTHER; note = 2'-O-methyluridine-3'-phosphate
  modified_base 16: mod_base = OTHER; note = 2'-O-methyladenosine-3'-phosphate
  modified_base 17: mod_base = OTHER; note = 2'-O-methylcytidine-3'-phosphate
  modified_base 18: mod_base = OTHER; note = 2'-O-methyluridine-3'-phosphate
  modified_base 19: mod_base = OTHER; note = 2'-O-methyladenosine-3'-phosphate
  modified_base 20: mod_base = OTHER; note = 2'-O-methyladenosine-3'-phosphate
  modified_base 21: mod_base = OTHER; note = 2'-O-methyladenosine-3'-phosphate ((2S,4R)-1-[29-[[2-(acetylamino)-2-deoxy-beta-D-galactopyra nosyl]oxy]-14,14-bis[[3-[[3-[[5-[[2-(acetylamino)-2-deoxy-b eta-D-galactopyranosyl]oxy]-1-oxopentyl]amino]propyl]amino] -3-oxopropoxy]methyl]-1,12,19,25-tetraoxo-16-oxa-13,20,24-t riazanonacos-1-yl]-4-hydroxy-2-pyrrolidinyl)methyl ester
cagagacaatgagctactaaa

SEQ ID NO: 918 - RNA, 23 nt, synthetic construct
  source 1..23: mol_type = other RNA
  modified_base 1: mod_base = OTHER; note = 2'-O-methyluridine-3'-phosphorothioate 5'-(E)-Vinylphosphonate
  modified_base 2: mod_base = OTHER; note = 2'-deoxy-2'-fluorouridine-3'-phosphorothioate
  modified_base 3: mod_base = OTHER; note = 2'-O-methyluridine-3'-phosphate
  modified_base 4: mod_base = OTHER; note = 2'-O-methyladenosine-3'-phosphate
  modified_base 5: mod_base = OTHER; note = 2'-O-methylguanosine-3'-phosphate
  modified_base 6: mod_base = OTHER; note = 2'-deoxy-2'-fluorouridine-3'-phosphate
  modified_base 7: mod_base = OTHER; note = 2'-O-methyladenosine-3'-phosphate
  modified_base 8: mod_base = OTHER; note = 2'-deoxy-2'-fluoroguanosine-3'-phosphate
  modified_base 9: mod_base = OTHER; note = 2'-deoxy-2'-fluorocytidine-3'-phosphate
  modified_base 10: mod_base = OTHER; note = 2'-O-methyluridine-3'-phosphate
  modified_base 11: mod_base = OTHER; note = 2'-O-methylcytidine-3'-phosphate
  modified_base 12: mod_base = OTHER; note = 2'-O-methyladenosine-3'-phosphate
  modified_base 13: mod_base = OTHER; note = 2'-O-methyluridine-3'-phosphate
  modified_base 14: mod_base = OTHER; note = 2'-deoxy-2'-fluorouridine-3'-phosphate
  modified_base 15: mod_base = OTHER; note = 2'-O-methylguanosine-3'-phosphate
  modified_base 16: mod_base = OTHER; note = 2'-deoxy-2'-fluorouridine-3'-phosphate
  modified_base 17: mod_base = OTHER; note = 2'-O-methylcytidine-3'-phosphate
  modified_base 18: mod_base = OTHER; note = 2'-O-methyluridine-3'-phosphate
  modified_base 19: mod_base = OTHER; note = 2'-O-methylcytidine-3'-phosphate
  modified_base 20: mod_base = OTHER; note = 2'-O-methyluridine-3'-phosphate
  modified_base 21: mod_base = OTHER; note = 2'-O-methylguanosine-3'-phosphorothioate
  modified_base 22: mod_base = OTHER; note = 2'-O-methylcytidine-3'-phosphorothioate
  modified_base 23: mod_base = OTHER; note = 2'-O-methylcytidine
tttagtagctcattgtctctgcc

SEQ ID NO: 919 - RNA, 21 nt, synthetic construct
  source 1..21: mol_type = other RNA
  modified_base 1: mod_base = OTHER; note = 2'-O-methyladenosine-3'-phosphorothioate
  modified_base 2: mod_base = OTHER; note = 2'-O-methylguanosine-3'-phosphorothioate
  modified_base 3: mod_base = OTHER; note = 2'-O-methyladenosine-3'-phosphate
  modified_base 4: mod_base = OTHER; note = 2'-O-methylguanosine-3'-phosphate
  modified_base 5: mod_base = OTHER; note = 2'-O-methyladenosine-3'-phosphate
  modified_base 6: mod_base = OTHER; note = 2'-O-methylcytidine-3'-phosphate
  modified_base 7: mod_base = OTHER; note = 2'-deoxy-2'-fluoroadenosine-3'-phosphate
  modified_base 8: mod_base = OTHER; note = 2'-O-methyladenosine-3'-phosphate
  modified_base 9: mod_base = OTHER; note = 2'-deoxy-2'-fluorouridine-3'-phosphate
  modified_base 10: mod_base = OTHER; note = 2'-deoxy-2'-fluoroguanosine-3'-phosphate
  modified_base 11: mod_base = OTHER; note = 2'-deoxy-2'-fluoroadenosine-3'-phosphate
  modified_base 12: mod_base = OTHER; note = 2'-O-methylguanosine-3'-phosphate
  modified_base 13: mod_base = OTHER; note = 2'-O-methylcytidine-3'-phosphate
  modified_base 14: mod_base = OTHER; note = 2'-O-methyluridine-3'-phosphate
  modified_base 15: mod_base = OTHER; note = 2'-O-methyladenosine-3'-phosphate
  modified_base 16: mod_base = OTHER; note = 2'-O-methylcytidine-3'-phosphate
  modified_base 17: mod_base = OTHER; note = 2'-O-methyluridine-3'-phosphate
  modified_base 18: mod_base = OTHER; note = 2'-O-methyladenosine-3'-phosphate
  modified_base 19: mod_base = OTHER; note = 2'-O-methyladenosine-3'-phosphate
  modified_base 20: mod_base = OTHER; note = 2'-O-methyluridine-3'-phosphate
  modified_base 21: mod_base = OTHER; note = 2'-O-methyladenosine-3'-phosphate ((2S,4R)-1-[29-[[2-(acetylamino)-2-deoxy-beta-D-galactopyra nosyl]oxy]-14,14-bis[[3-[[3-[[5-[[2-(acetylamino)-2-deoxy-b eta-D-galactopyranosyl]oxy]-1-oxopentyl]amino]propyl]amino] -3-oxopropoxy]methyl]-1,12,19,25-tetraoxo-16-oxa-13,20,24-t riazanonacos-1-yl]-4-hydroxy-2-pyrrolidinyl)methyl ester
agagacaatgagctactaata

SEQ ID NO: 920 - RNA, 23 nt, synthetic construct
  source 1..23: mol_type = other RNA
  modified_base 1: mod_base = OTHER; note = 2'-O-methyluridine-3'-phosphorothioate 5'-(E)-Vinylphosphonate
  modified_base 2: mod_base = OTHER; note = 2'-deoxy-2'-fluoroadenosine-3'-phosphorothioate
  modified_base 3: mod_base = OTHER; note = 2'-O-methyluridine-3'-phosphate
  modified_base 4: mod_base = OTHER; note = 2'-O-methyluridine-3'-phosphate
  modified_base 5: mod_base = OTHER; note = 2'-O-methyladenosine-3'-phosphate
  modified_base 6: mod_base = OTHER; note = 2'-deoxy-2'-fluoroguanosine-3'-phosphate
  modified_base 7: mod_base = OTHER; note = 2'-O-methyluridine-3'-phosphate
  modified_base 8: mod_base = OTHER; note = 2'-deoxy-2'-fluoroadenosine-3'-phosphate
  modified_base 9: mod_base = OTHER; note = 2'-deoxy-2'-fluoroguanosine-3'-phosphate
  modified_base 10: mod_base = OTHER; note = 2'-O-methylcytidine-3'-phosphate
  modified_base 11: mod_base = OTHER; note = 2'-O-methyluridine-3'-phosphate
  modified_base 12: mod_base = OTHER; note = 2'-O-methylcytidine-3'-phosphate
  modified_base 13: mod_base = OTHER; note = 2'-O-methyladenosine-3'-phosphate
  modified_base 14: mod_base = OTHER; note = 2'-deoxy-2'-fluorouridine-3'-phosphate
  modified_base 15: mod_base = OTHER; note = 2'-O-methyluridine-3'-phosphate
  modified_base 16: mod_base = OTHER; note = 2'-deoxy-2'-fluoroguanosine-3'-phosphate
  modified_base 17: mod_base = OTHER; note = 2'-O-methyluridine-3'-phosphate
  modified_base 18: mod_base = OTHER; note = 2'-O-methylcytidine-3'-phosphate
  modified_base 19: mod_base = OTHER; note = 2'-O-methyluridine-3'-phosphate
  modified_base 20: mod_base = OTHER; note = 2'-O-methylcytidine-3'-phosphate
  modified_base 21: mod_base = OTHER; note = 2'-O-methyluridine-3'-phosphorothioate
  modified_base 22: mod_base = OTHER; note = 2'-O-methylguanosine-3'-phosphorothioate
  modified_base 23: mod_base = OTHER; note = 2'-O-methylcytidine
tattagtagctcattgtctctgc

SEQ ID NO: 921 - RNA, 21 nt, synthetic construct
  source 1..21: mol_type = other RNA
  modified_base 1: mod_base = OTHER; note = 2'-O-methylcytidine-3'-phosphorothioate
  modified_base 2: mod_base = OTHER; note = 2'-O-methyladenosine-3'-phosphorothioate
  modified_base 3: mod_base = OTHER; note = 2'-O-methylguanosine-3'-phosphate
  modified_base 4: mod_base = OTHER; note = 2'-O-methyladenosine-3'-phosphate
  modified_base 5: mod_base = OTHER; note = 2'-O-methylguanosine-3'-phosphate
  modified_base 6: mod_base = OTHER; note = 2'-O-methyluridine-3'-phosphate
  modified_base 7: mod_base = OTHER; note = 2'-deoxy-2'-fluorocytidine-3'-phosphate
  modified_base 8: mod_base = OTHER; note = 2'-O-methyluridine-3'-phosphate
  modified_base 9: mod_base = OTHER; note = 2'-deoxy-2'-fluorouridine-3'-phosphate
  modified_base 10: mod_base = OTHER; note = 2'-deoxy-2'-fluorouridine-3'-phosphate
  modified_base 11: mod_base = OTHER; note = 2'-deoxy-2'-fluorouridine-3'-phosphate
  modified_base 12: mod_base = OTHER; note = 2'-O-methylcytidine-3'-phosphate
  modified_base 13: mod_base = OTHER; note = 2'-O-methyluridine-3'-phosphate
  modified_base 14: mod_base = OTHER; note = 2'-O-methylcytidine-3'-phosphate
  modified_base 15: mod_base = OTHER; note = 2'-O-methylcytidine-3'-phosphate
  modified_base 16: mod_base = OTHER; note = 2'-O-methyluridine-3'-phosphate
  modified_base 17: mod_base = OTHER; note = 2'-O-methyladenosine-3'-phosphate
  modified_base 18: mod_base = OTHER; note = 2'-O-methylcytidine-3'-phosphate
  modified_base 19: mod_base = OTHER; note = 2'-O-methyladenosine-3'-phosphate
  modified_base 20: mod_base = OTHER; note = 2'-O-methylguanosine-3'-phosphate
  modified_base 21: mod_base = OTHER; note = 2'-O-methyladenosine-3'-phosphate ((2S,4R)-1-[29-[[2-(acetylamino)-2-deoxy-beta-D-galactopyra nosyl]oxy]-14,14-bis[[3-[[3-[[5-[[2-(acetylamino)-2-deoxy-b eta-D-galactopyranosyl]oxy]-1-oxopentyl]amino]propyl]amino] -3-oxopropoxy]methyl]-1,12,19,25-tetraoxo-16-oxa-13,20,24-t riazanonacos-1-yl]-4-hydroxy-2-pyrrolidinyl)methyl ester
cagagtcttttctcctacaga

SEQ ID NO: 922 - RNA, 23 nt, synthetic construct
  source 1..23: mol_type = other RNA
  modified_base 1: mod_base = OTHER; note = 2'-O-methyluridine-3'-phosphorothioate 5'-(E)-Vinylphosphonate
  modified_base 2: mod_base = OTHER; note = 2'-deoxy-2'-fluorocytidine-3'-phosphorothioate
  modified_base 3: mod_base = OTHER; note = 2'-O-methyluridine-3'-phosphate
  modified_base 4: mod_base = OTHER; note = 2'-O-methylguanosine-3'-phosphate
  modified_base 5: mod_base = OTHER; note = 2'-O-methyluridine-3'-phosphate
  modified_base 6: mod_base = OTHER; note = 2'-deoxy-2'-fluoroadenosine-3'-phosphate
  modified_base 7: mod_base = OTHER; note = 2'-O-methylguanosine-3'-phosphate
  modified_base 8: mod_base = OTHER; note = 2'-deoxy-2'-fluoroguanosine-3'-phosphate
  modified_base 9: mod_base = OTHER; note = 2'-deoxy-2'-fluoroadenosine-3'-phosphate
  modified_base 10: mod_base = OTHER; note = 2'-O-methylguanosine-3'-phosphate
  modified_base 11: mod_base = OTHER; note = 2'-O-methyladenosine-3'-phosphate
  modified_base 12: mod_base = OTHER; note = 2'-O-methyladenosine-3'-phosphate
  modified_base 13: mod_base = OTHER; note = 2'-O-methyladenosine-3'-phosphate
  modified_base 14: mod_base = OTHER; note = 2'-deoxy-2'-fluoroadenosine-3'-phosphate
  modified_base 15: mod_base = OTHER; note = 2'-O-methylguanosine-3'-phosphate
  modified_base 16: mod_base = OTHER; note = 2'-deoxy-2'-fluoroadenosine-3'-phosphate
  modified_base 17: mod_base = OTHER; note = 2'-O-methylcytidine-3'-phosphate
  modified_base 18: mod_base = OTHER; note = 2'-O-methyluridine-3'-phosphate
  modified_base 19: mod_base = OTHER; note = 2'-O-methylcytidine-3'-phosphate
  modified_base 20: mod_base = OTHER; note = 2'-O-methyluridine-3'-phosphate
  modified_base 21: mod_base = OTHER; note = 2'-O-methylguanosine-3'-phosphorothioate
  modified_base 22: mod_base = OTHER; note = 2'-O-methyladenosine-3'-phosphorothioate
  modified_base 23: mod_base = OTHER; note = 2'-O-methylguanosine
tctgtaggagaaaagactctgag

SEQ ID NO: 923 - RNA, 21 nt, synthetic construct
  source 1..21: mol_type = other RNA
  modified_base 1: mod_base = OTHER; note = 2'-O-methyluridine-3'-phosphorothioate
  modified_base 2: mod_base = OTHER; note = 2'-O-methylcytidine-3'-phosphorothioate
  modified_base 3: mod_base = OTHER; note = 2'-O-methyluridine-3'-phosphate
  modified_base 4: mod_base = OTHER; note = 2'-O-methylcytidine-3'-phosphate
  modified_base 5: mod_base = OTHER; note = 2'-O-methyladenosine-3'-phosphate
  modified_base 6: mod_base = OTHER; note = 2'-O-methylguanosine-3'-phosphate
  modified_base 7: mod_base = OTHER; note = 2'-deoxy-2'-fluoroadenosine-3'-phosphate
  modified_base 8: mod_base = OTHER; note = 2'-O-methylguanosine-3'-phosphate
  modified_base 9: mod_base = OTHER; note = 2'-deoxy-2'-fluorouridine-3'-phosphate
  modified_base 10: mod_base = OTHER; note = 2'-deoxy-2'-fluorocytidine-3'-phosphate
  modified_base 11: mod_base = OTHER; note = 2'-deoxy-2'-fluorouridine-3'-phosphate
  modified_base 12: mod_base = OTHER; note = 2'-O-methyluridine-3'-phosphate
  modified_base 13: mod_base = OTHER; note = 2'-O-methyluridine-3'-phosphate
  modified_base 14: mod_base = OTHER; note = 2'-O-methyluridine-3'-phosphate
  modified_base 15: mod_base = OTHER; note = 2'-O-methylcytidine-3'-phosphate
  modified_base 16: mod_base = OTHER; note = 2'-O-methyluridine-3'-phosphate
  modified_base 17: mod_base = OTHER; note = 2'-O-methylcytidine-3'-phosphate
  modified_base 18: mod_base = OTHER; note = 2'-O-methylcytidine-3'-phosphate
  modified_base 19: mod_base = OTHER; note = 2'-O-methyluridine-3'-phosphate
  modified_base 20: mod_base = OTHER; note = 2'-O-methyladenosine-3'-phosphate
  modified_base 21: mod_base = OTHER; note = 2'-O-methyladenosine-3'-phosphate ((2S,4R)-1-[29-[[2-(acetylamino)-2-deoxy-beta-D-galactopyra nosyl]oxy]-14,14-bis[[3-[[3-[[5-[[2-(acetylamino)-2-deoxy-b eta-D-galactopyranosyl]oxy]-1-oxopentyl]amino]propyl]amino] -3-oxopropoxy]methyl]-1,12,19,25-tetraoxo-16-oxa-13,20,24-t riazanonacos-1-yl]-4-hydroxy-2-pyrrolidinyl)methyl ester
tctcagagtcttttctcctaa

SEQ ID NO: 924 - RNA, 23 nt, synthetic construct
  source 1..23: mol_type = other RNA
  modified_base 1: mod_base = OTHER; note = 2'-O-methyluridine-3'-phosphorothioate 5'-(E)-Vinylphosphonate
  modified_base 2: mod_base = OTHER; note = 2'-deoxy-2'-fluorouridine-3'-phosphorothioate
  modified_base 3: mod_base = OTHER; note = 2'-O-methyladenosine-3'-phosphate
  modified_base 4: mod_base = OTHER; note = 2'-O-methylguanosine-3'-phosphate
  modified_base 5: mod_base = OTHER; note = 2'-O-methylguanosine-3'-phosphate
  modified_base 6: mod_base = OTHER; note = 2'-deoxy-2'-fluoroadenosine-3'-phosphate
  modified_base 7: mod_base = OTHER; note = 2'-O-methylguanosine-3'-phosphate
  modified_base 8: mod_base = OTHER; note = 2'-deoxy-2'-fluoroadenosine-3'-phosphate
  modified_base 9: mod_base = OTHER; note = 2'-deoxy-2'-fluoroadenosine-3'-phosphate
  modified_base 10: mod_base = OTHER; note = 2'-O-methyladenosine-3'-phosphate
  modified_base 11: mod_base = OTHER; note = 2'-O-methyladenosine-3'-phosphate
  modified_base 12: mod_base = OTHER; note = 2'-O-methylguanosine-3'-phosphate
  modified_base 13: mod_base = OTHER; note = 2'-O-methyladenosine-3'-phosphate
  modified_base 14: mod_base = OTHER; note = 2'-deoxy-2'-fluorocytidine-3'-phosphate
  modified_base 15: mod_base = OTHER; note = 2'-O-methyluridine-3'-phosphate
  modified_base 16: mod_base = OTHER; note = 2'-deoxy-2'-fluorocytidine-3'-phosphate
  modified_base 17: mod_base = OTHER; note = 2'-O-methyluridine-3'-phosphate
  modified_base 18: mod_base = OTHER; note = 2'-O-methylguanosine-3'-phosphate
  modified_base 19: mod_base = OTHER; note = 2'-O-methyladenosine-3'-phosphate
  modified_base 20: mod_base = OTHER; note = 2'-O-methylguanosine-3'-phosphate
  modified_base 21: mod_base = OTHER; note = 2'-O-methyladenosine-3'-phosphorothioate
  modified_base 22: mod_base = OTHER; note = 2'-O-methylguanosine-3'-phosphorothioate
  modified_base 23: mod_base = OTHER; note = 2'-O-methylcytidine
ttaggagaaaagactctgagagc

SEQ ID NO: 925 - RNA, 21 nt, synthetic construct
  source 1..21: mol_type = other RNA
  modified_base 1: mod_base = OTHER; note = 2'-O-methylcytidine-3'-phosphorothioate
  modified_base 2: mod_base = OTHER; note = 2'-O-methylcytidine-3'-phosphorothioate
  modified_base 3: mod_base = OTHER; note = 2'-O-methyluridine-3'-phosphate
  modified_base 4: mod_base = OTHER; note = 2'-O-methyladenosine-3'-phosphate
  modified_base 5: mod_base = OTHER; note = 2'-O-methylcytidine-3'-phosphate
  modified_base 6: mod_base = OTHER; note = 2'-O-methyladenosine-3'-phosphate
  modified_base 7: mod_base = OTHER; note = 2'-deoxy-2'-fluoroguanosine-3'-phosphate
  modified_base 8: mod_base = OTHER; note = 2'-O-methyluridine-3'-phosphate
  modified_base 9: mod_base = OTHER; note = 2'-deoxy-2'-fluoroguanosine-3'-phosphate
  modified_base 10: mod_base = OTHER; note = 2'-deoxy-2'-fluoroadenosine-3'-phosphate
  modified_base 11: mod_base = OTHER; note = 2'-deoxy-2'-fluorocytidine-3'-phosphate
  modified_base 12: mod_base = OTHER; note = 2'-O-methylcytidine-3'-phosphate
  modified_base 13: mod_base = OTHER; note = 2'-O-methyluridine-3'-phosphate
  modified_base 14: mod_base = OTHER; note = 2'-O-methyluridine-3'-phosphate
  modified_base 15: mod_base = OTHER; note = 2'-O-methyluridine-3'-phosphate
  modified_base 16: mod_base = OTHER; note = 2'-O-methylcytidine-3'-phosphate
  modified_base 17: mod_base = OTHER; note = 2'-O-methylcytidine-3'-phosphate
  modified_base 18: mod_base = OTHER; note = 2'-O-methylcytidine-3'-phosphate
  modified_base 19: mod_base = OTHER; note = 2'-O-methylguanosine-3'-phosphate
  modified_base 20: mod_base = OTHER; note = 2'-O-methylcytidine-3'-phosphate
  modified_base 21: mod_base = OTHER; note = 2'-O-methyladenosine-3'-phosphate ((2S,4R)-1-[29-[[2-(acetylamino)-2-deoxy-beta-D-galactopyra nosyl]oxy]-14,14-bis[[3-[[3-[[5-[[2-(acetylamino)-2-deoxy-b eta-D-galactopyranosyl]oxy]-1-oxopentyl]amino]propyl]amino] -3-oxopropoxy]methyl]-1,12,19,25-tetraoxo-16-oxa-13,20,24-t riazanonacos-1-yl]-4-hydroxy-2-pyrrolidinyl)methyl ester
cctacagtgacctttcccgca

SEQ ID NO: 926 - RNA, 23 nt, synthetic construct
  source 1..23: mol_type = other RNA
  modified_base 1: mod_base = OTHER; note = 2'-O-methyluridine-3'-phosphorothioate 5'-(E)-Vinylphosphonate
  modified_base 2: mod_base = OTHER; note = 2'-deoxy-2'-fluoroguanosine-3'-phosphorothioate
  modified_base 3: mod_base = OTHER; note = 2'-O-methylcytidine-3'-phosphate
  modified_base 4: mod_base = OTHER; note = 2'-O-methylguanosine-3'-phosphate
  modified_base 5: mod_base = OTHER; note = 2'-O-methylguanosine-3'-phosphate
  modified_base 6: mod_base = OTHER; note = 2'-deoxy-2'-fluoroguanosine-3'-phosphate
  modified_base 7: mod_base = OTHER; note = 2'-O-methyladenosine-3'-phosphate
  modified_base 8: mod_base = OTHER; note = 2'-deoxy-2'-fluoroadenosine-3'-phosphate
  modified_base 9: mod_base = OTHER; note = 2'-deoxy-2'-fluoroadenosine-3'-phosphate
  modified_base 10: mod_base = OTHER; note = 2'-O-methylguanosine-3'-phosphate
  modified_base 11: mod_base = OTHER; note = 2'-O-methylguanosine-3'-phosphate
  modified_base 12: mod_base = OTHER; note = 2'-O-methyluridine-3'-phosphate
  modified_base 13: mod_base = OTHER; note = 2'-O-methylcytidine-3'-phosphate
  modified_base 14: mod_base = OTHER; note = 2'-deoxy-2'-fluoroadenosine-3'-phosphate
  modified_base 15: mod_base = OTHER; note = 2'-O-methylcytidine-3'-phosphate
  modified_base 16: mod_base = OTHER; note = 2'-deoxy-2'-fluorouridine-3'-phosphate
  modified_base 17: mod_base = OTHER; note = 2'-O-methylguanosine-3'-phosphate
  modified_base 18: mod_base = OTHER; note = 2'-O-methyluridine-3'-phosphate
  modified_base 19: mod_base = OTHER; note = 2'-O-methyladenosine-3'-phosphate
  modified_base 20: mod_base = OTHER; note = 2'-O-methylguanosine-3'-phosphate
  modified_base 21: mod_base = OTHER; note = 2'-O-methylguanosine-3'-phosphorothioate
  modified_base 22: mod_base = OTHER; note = 2'-O-methyluridine-3'-phosphorothioate
  modified_base 23: mod_base = OTHER; note = 2'-O-methyluridine
tgcgggaaaggtcactgtaggtt

SEQ ID NO: 927 - RNA, 21 nt, synthetic construct
  source 1..21: mol_type = other RNA
  modified_base 1: mod_base = OTHER; note = 2'-O-methylguanosine-3'-phosphorothioate
  modified_base 2: mod_base = OTHER; note = 2'-O-methylcytidine-3'-phosphorothioate
  modified_base 3: mod_base = OTHER; note = 2'-O-methylcytidine-3'-phosphate
  modified_base 4: mod_base = OTHER; note = 2'-O-methyluridine-3'-phosphate
  modified_base 5: mod_base = OTHER; note = 2'-O-methyluridine-3'-phosphate
  modified_base 6: mod_base = OTHER; note = 2'-O-methylcytidine-3'-phosphate
  modified_base 7: mod_base = OTHER; note = 2'-deoxy-2'-fluorouridine-3'-phosphate
  modified_base 8: mod_base = OTHER; note = 2'-O-methyluridine-3'-phosphate
  modified_base 9: mod_base = OTHER; note = 2'-deoxy-2'-fluorouridine-3'-phosphate
  modified_base 10: mod_base = OTHER; note = 2'-deoxy-2'-fluorocytidine-3'-phosphate
  modified_base 11: mod_base = OTHER; note = 2'-deoxy-2'-fluoroadenosine-3'-phosphate
  modified_base 12: mod_base = OTHER; note = 2'-O-methylguanosine-3'-phosphate
  modified_base 13: mod_base = OTHER; note = 2'-O-methyladenosine-3'-phosphate
  modified_base 14: mod_base = OTHER; note = 2'-O-methyladenosine-3'-phosphate
  modified_base 15: mod_base = OTHER; note = 2'-O-methylguanosine-3'-phosphate
  modified_base 16: mod_base = OTHER; note = 2'-O-methylcytidine-3'-phosphate
  modified_base 17: mod_base = OTHER; note = 2'-O-methylcytidine-3'-phosphate
  modified_base 18: mod_base = OTHER; note = 2'-O-methyluridine-3'-phosphate
  modified_base 19: mod_base = OTHER; note = 2'-O-methyluridine-3'-phosphate
  modified_base 20: mod_base = OTHER; note = 2'-O-methyluridine-3'-phosphate
  modified_base 21: mod_base = OTHER; note = 2'-O-methyladenosine-3'-phosphate ((2S,4R)-1-[29-[[2-(acetylamino)-2-deoxy-beta-D-galactopyra nosyl]oxy]-14,14-bis[[3-[[3-[[5-[[2-(acetylamino)-2-deoxy-b eta-D-galactopyranosyl]oxy]-1-oxopentyl]amino]propyl]amino] -3-oxopropoxy]methyl]-1,12,19,25-tetraoxo-16-oxa-13,20,24-t riazanonacos-1-yl]-4-hydroxy-2-pyrrolidinyl)methyl ester
gccttctttcagaagccttta

SEQ ID NO: 928 - RNA, 23 nt, synthetic construct
  source 1..23: mol_type = other RNA
  modified_base 1: mod_base = OTHER; note = 2'-O-methyluridine-3'-phosphorothioate 5'-(E)-Vinylphosphonate
  modified_base 2: mod_base = OTHER; note = 2'-deoxy-2'-fluoroadenosine-3'-phosphorothioate
  modified_base 3: mod_base = OTHER; note = 2'-O-methyladenosine-3'-phosphate
  modified_base 4: mod_base = OTHER; note = 2'-O-methyladenosine-3'-phosphate
  modified_base 5: mod_base = OTHER; note = 2'-O-methylguanosine-3'-phosphate
  modified_base 6: mod_base = OTHER; note = 2'-deoxy-2'-fluoroguanosine-3'-phosphate
  modified_base 7: mod_base = OTHER; note = 2'-O-methylcytidine-3'-phosphate
  modified_base 8: mod_base = OTHER; note = 2'-deoxy-2'-fluorouridine-3'-phosphate
  modified_base 9: mod_base = OTHER; note = 2'-deoxy-2'-fluorouridine-3'-phosphate
  modified_base 10: mod_base = OTHER; note = 2'-O-methylcytidine-3'-phosphate
  modified_base 11: mod_base = OTHER; note = 2'-O-methyluridine-3'-phosphate
  modified_base 12: mod_base = OTHER; note = 2'-O-methylguanosine-3'-phosphate
  modified_base 13: mod_base = OTHER; note = 2'-O-methyladenosine-3'-phosphate
  modified_base 14: mod_base = OTHER; note = 2'-deoxy-2'-fluoroadenosine-3'-phosphate
  modified_base 15: mod_base = OTHER; note = 2'-O-methyladenosine-3'-phosphate
  modified_base 16: mod_base = OTHER; note = 2'-deoxy-2'-fluoroguanosine-3'-phosphate
  modified_base 17: mod_base = OTHER; note = 2'-O-methyladenosine-3'-phosphate
  modified_base 18: mod_base = OTHER; note = 2'-O-methyladenosine-3'-phosphate
  modified_base 19: mod_base = OTHER; note = 2'-O-methylguanosine-3'-phosphate
  modified_base 20: mod_base = OTHER; note = 2'-O-methylguanosine-3'-phosphate
  modified_base 21: mod_base = OTHER; note = 2'-O-methylcytidine-3'-phosphorothioate
  modified_base 22: mod_base = OTHER; note = 2'-O-methyluridine-3'-phosphorothioate
  modified_base 23: mod_base = OTHER; note = 2'-O-methylguanosine
taaaggcttctgaaagaaggctg

SEQ ID NO: 929 - RNA, 21 nt, synthetic construct
  source 1..21: mol_type = other RNA
  modified_base 1: mod_base = OTHER; note = 2'-O-methyluridine-3'-phosphorothioate
  modified_base 2: mod_base = OTHER; note = 2'-O-methylcytidine-3'-phosphorothioate
  modified_base 3: mod_base = OTHER; note = 2'-O-methylcytidine-3'-phosphate
  modified_base 4: mod_base = OTHER; note = 2'-O-methylcytidine-3'-phosphate
  modified_base 5: mod_base = OTHER; note = 2'-O-methylguanosine-3'-phosphate
  modified_base 6: mod_base = OTHER; note = 2'-O-methylcytidine-3'-phosphate
  modified_base 7: mod_base = OTHER; note = 2'-deoxy-2'-fluorouridine-3'-phosphate
  modified_base 8: mod_base = OTHER; note = 2'-O-methylcytidine-3'-phosphate
  modified_base 9: mod_base = OTHER; note = 2'-deoxy-2'-fluorouridine-3'-phosphate
  modified_base 10: mod_base = OTHER; note = 2'-deoxy-2'-fluorocytidine-3'-phosphate
  modified_base 11: mod_base = OTHER; note = 2'-deoxy-2'-fluoroadenosine-3'-phosphate
  modified_base 12: mod_base = OTHER; note = 2'-O-methylguanosine-3'-phosphate
  modified_base 13: mod_base = OTHER; note = 2'-O-methyladenosine-3'-phosphate
  modified_base 14: mod_base = OTHER; note = 2'-O-methylguanosine-3'-phosphate
  modified_base 15: mod_base = OTHER; note = 2'-O-methyluridine-3'-phosphate
  modified_base 16: mod_base = OTHER; note = 2'-O-methylcytidine-3'-phosphate
  modified_base 17: mod_base = OTHER; note = 2'-O-methyluridine-3'-phosphate
  modified_base 18: mod_base = OTHER; note = 2'-O-methyluridine-3'-phosphate
  modified_base 19: mod_base = OTHER; note = 2'-O-methyluridine-3'-phosphate
  modified_base 20: mod_base = OTHER; note = 2'-O-methyluridine-3'-phosphate
  modified_base 21: mod_base = OTHER; note = 2'-O-methyladenosine-3'-phosphate ((2S,4R)-1-[29-[[2-(acetylamino)-2-deoxy-beta-D-galactopyra nosyl]oxy]-14,14-bis[[3-[[3-[[5-[[2-(acetylamino)-2-deoxy-b eta-D-galactopyranosyl]oxy]-1-oxopentyl]amino]propyl]amino] -3-oxopropoxy]methyl]-1,12,19,25-tetraoxo-16-oxa-13,20,24-t riazanonacos-1-yl]-4-hydroxy-2-pyrrolidinyl)methyl ester
tcccgctctcagagtctttta

SEQ ID NO: 930 - RNA, 23 nt, synthetic construct
  source 1..23: mol_type = other RNA
  modified_base 1: mod_base = OTHER; note = 2'-O-methyluridine-3'-phosphorothioate 5'-(E)-Vinylphosphonate
  modified_base 2: mod_base = OTHER; note = 2'-deoxy-2'-fluoroadenosine-3'-phosphorothioate
  modified_base 3: mod_base = OTHER; note = 2'-O-methyladenosine-3'-phosphate
  modified_base 4: mod_base = OTHER; note = 2'-O-methyladenosine-3'-phosphate
  modified_base 5: mod_base = OTHER; note = 2'-O-methyladenosine-3'-phosphate
  modified_base 6: mod_base = OTHER; note = 2'-deoxy-2'-fluoroguanosine-3'-phosphate
  modified_base 7: mod_base = OTHER; note = 2'-O-methyladenosine-3'-phosphate
  modified_base 8: mod_base = OTHER; note = 2'-deoxy-2'-fluorocytidine-3'-phosphate
  modified_base 9: mod_base = OTHER; note = 2'-deoxy-2'-fluorouridine-3'-phosphate
  modified_base 10: mod_base = OTHER; note = 2'-O-methylcytidine-3'-phosphate
  modified_base 11: mod_base = OTHER; note = 2'-O-methyluridine-3'-phosphate
  modified_base 12: mod_base = OTHER; note = 2'-O-methylguanosine-3'-phosphate
  modified_base 13: mod_base = OTHER; note = 2'-O-methyladenosine-3'-phosphate
  modified_base 14: mod_base = OTHER; note = 2'-deoxy-2'-fluoroguanosine-3'-phosphate
  modified_base 15: mod_base = OTHER; note = 2'-O-methyladenosine-3'-phosphate
  modified_base 16: mod_base = OTHER; note = 2'-deoxy-2'-fluoroguanosine-3'-phosphate
  modified_base 17: mod_base = OTHER; note = 2'-O-methylcytidine-3'-phosphate
  modified_base 18: mod_base = OTHER; note = 2'-O-methylguanosine-3'-phosphate
  modified_base 19: mod_base = OTHER; note = 2'-O-methylguanosine-3'-phosphate
  modified_base 20: mod_base = OTHER; note = 2'-O-methylguanosine-3'-phosphate
  modified_base 21: mod_base = OTHER; note = 2'-O-methyladenosine-3'-phosphorothioate
  modified_base 22: mod_base = OTHER; note = 2'-O-methyladenosine-3'-phosphorothioate
  modified_base 23: mod_base = OTHER; note = 2'-O-methyladenosine
taaaagactctgagagcgggaaa

SEQ ID NO: 931 - RNA, 21 nt, synthetic construct
  source 1..21: mol_type = other RNA
  modified_base 1: mod_base = OTHER; note = 2'-O-methylguanosine-3'-phosphorothioate
  modified_base 2: mod_base = OTHER; note = 2'-O-methyluridine-3'-phosphorothioate
  modified_base 3: mod_base = OTHER; note = 2'-O-methylcytidine-3'-phosphate
  modified_base 4: mod_base = OTHER; note = 2'-O-methyluridine-3'-phosphate
  modified_base 5: mod_base = OTHER; note = 2'-O-methyluridine-3'-phosphate
  modified_base 6: mod_base = OTHER; note = 2'-O-methyluridine-3'-phosphate
  modified_base 7: mod_base = OTHER; note = 2'-deoxy-2'-fluorouridine-3'-phosphate
  modified_base 8: mod_base = OTHER; note = 2'-O-methylcytidine-3'-phosphate
  modified_base 9: mod_base = OTHER; note = 2'-deoxy-2'-fluorouridine-3'-phosphate
  modified_base 10: mod_base = OTHER; note = 2'-deoxy-2'-fluorocytidine-3'-phosphate
  modified_base 11: mod_base = OTHER; note = 2'-deoxy-2'-fluorocytidine-3'-phosphate
  modified_base 12: mod_base = OTHER; note = 2'-O-methyluridine-3'-phosphate
  modified_base 13: mod_base = OTHER; note = 2'-O-methyladenosine-3'-phosphate
  modified_base 14: mod_base = OTHER; note = 2'-O-methylcytidine-3'-phosphate
  modified_base 15: mod_base = OTHER; note = 2'-O-methyladenosine-3'-phosphate
  modified_base 16: mod_base = OTHER; note = 2'-O-methylguanosine-3'-phosphate
  modified_base 17: mod_base = OTHER; note = 2'-O-methyluridine-3'-phosphate
  modified_base 18: mod_base = OTHER; note = 2'-O-methylguanosine-3'-phosphate
  modified_base 19: mod_base = OTHER; note = 2'-O-methyluridine-3'-phosphate
  modified_base 20: mod_base = OTHER; note = 2'-O-methylcytidine-3'-phosphate
  modified_base 21: mod_base = OTHER; note = 2'-O-methyladenosine-3'-phosphate ((2S,4R)-1-[29-[[2-(acetylamino)-2-deoxy-beta-D-galactopyra nosyl]oxy]-14,14-bis[[3-[[3-[[5-[[2-(acetylamino)-2-deoxy-b eta-D-galactopyranosyl]oxy]-1-oxopentyl]amino]propyl]amino] -3-oxopropoxy]methyl]-1,12,19,25-tetraoxo-16-oxa-13,20,24-t riazanonacos-1-yl]-4-hydroxy-2-pyrrolidinyl)methyl ester
gtcttttctcctacagtgtca

SEQ ID NO: 932 - RNA, 23 nt, synthetic construct
  source 1..23: mol_type = other RNA
  modified_base 1: mod_base = OTHER; note = 2'-O-methyluridine-3'-phosphorothioate 5'-(E)-Vinylphosphonate
  modified_base 2: mod_base = OTHER; note = 2'-deoxy-2'-fluoroguanosine-3'-phosphorothioate
  modified_base 3: mod_base = OTHER; note = 2'-O-methyladenosine-3'-phosphate
  modified_base 4: mod_base = OTHER; note = 2'-O-methylcytidine-3'-phosphate
  modified_base 5: mod_base = OTHER; note = 2'-O-methyladenosine-3'-phosphate
  modified_base 6: mod_base = OTHER; note = 2'-deoxy-2'-fluorocytidine-3'-phosphate
  modified_base 7: mod_base = OTHER; note = 2'-O-methyluridine-3'-phosphate
  modified_base 8: mod_base = OTHER; note = 2'-deoxy-2'-fluoroguanosine-3'-phosphate
  modified_base 9: mod_base = OTHER; note = 2'-deoxy-2'-fluorouridine-3'-phosphate
  modified_base 10: mod_base = OTHER; note = 2'-O-methyladenosine-3'-phosphate
  modified_base 11: mod_base = OTHER; note = 2'-O-methylguanosine-3'-phosphate
  modified_base 12: mod_base = OTHER; note = 2'-O-methylguanosine-3'-phosphate
  modified_base 13: mod_base = OTHER; note = 2'-O-methyladenosine-3'-phosphate
  modified_base 14: mod_base = OTHER; note = 2'-deoxy-2'-fluoroguanosine-3'-phosphate
  modified_base 15: mod_base = OTHER; note = 2'-O-methyladenosine-3'-phosphate
  modified_base 16: mod_base = OTHER; note = 2'-deoxy-2'-fluoroadenosine-3'-phosphate
  modified_base 17: mod_base = OTHER; note = 2'-O-methyladenosine-3'-phosphate
  modified_base 18: mod_base = OTHER; note = 2'-O-methyladenosine-3'-phosphate
  modified_base 19: mod_base = OTHER; note = 2'-O-methylguanosine-3'-phosphate
  modified_base 20: mod_base = OTHER; note = 2'-O-methyladenosine-3'-phosphate
  modified_base 21: mod_base = OTHER; note = 2'-O-methylcytidine-3'-phosphorothioate
  modified_base 22: mod_base = OTHER; note = 2'-O-methyluridine-3'-phosphorothioate
  modified_base 23: mod_base = OTHER; note = 2'-O-methylcytidine
tgacactgtaggagaaaagactc

SEQ ID NO: 933 - RNA, 21 nt, synthetic construct
  source 1..21: mol_type = other RNA
  modified_base 1: mod_base = OTHER; note = 2'-O-methylcytidine-3'-phosphorothioate
  modified_base 2: mod_base = OTHER; note = 2'-O-methyluridine-3'-phosphorothioate
  modified_base 3: mod_base = OTHER; note = 2'-O-methyladenosine-3'-phosphate
  modified_base 4: mod_base = OTHER; note = 2'-O-methylcytidine-3'-phosphate
  modified_base 5: mod_base = OTHER; note = 2'-O-methyladenosine-3'-phosphate
  modified_base 6: mod_base = OTHER; note = 2'-O-methylguanosine-3'-phosphate
  modified_base 7: mod_base = OTHER; note = 2'-deoxy-2'-fluorouridine-3'-phosphate
  modified_base 8: mod_base = OTHER; note = 2'-O-methylguanosine-3'-phosphate
  modified_base 9: mod_base = OTHER; note = 2'-deoxy-2'-fluoroadenosine-3'-phosphate
  modified_base 10: mod_base = OTHER; note = 2'-deoxy-2'-fluorocytidine-3'-phosphate
  modified_base 11: mod_base = OTHER; note = 2'-deoxy-2'-fluorocytidine-3'-phosphate
  modified_base 12: mod_base = OTHER; note = 2'-O-methyluridine-3'-phosphate
  modified_base 13: mod_base = OTHER; note = 2'-O-methyluridine-3'-phosphate
  modified_base 14: mod_base = OTHER; note = 2'-O-methyluridine-3'-phosphate
  modified_base 15: mod_base = OTHER; note = 2'-O-methylcytidine-3'-phosphate
  modified_base 16: mod_base = OTHER; note = 2'-O-methylcytidine-3'-phosphate
  modified_base 17: mod_base = OTHER; note = 2'-O-methylcytidine-3'-phosphate
  modified_base 18: mod_base = OTHER; note = 2'-O-methylguanosine-3'-phosphate
  modified_base 19: mod_base = OTHER; note = 2'-O-methylcytidine-3'-phosphate
  modified_base 20: mod_base = OTHER; note = 2'-O-methyluridine-3'-phosphate
  modified_base 21: mod_base = OTHER; note = 2'-O-methyladenosine-3'-phosphate ((2S,4R)-1-[29-[[2-(acetylamino)-2-deoxy-beta-D-galactopyra nosyl]oxy]-14,14-bis[[3-[[3-[[5-[[2-(acetylamino)-2-deoxy-b eta-D-galactopyranosyl]oxy]-1-oxopentyl]amino]propyl]amino] -3-oxopropoxy]methyl]-1,12,19,25-tetraoxo-16-oxa-13,20,24-t riazanonacos-1-yl]-4-hydroxy-2-pyrrolidinyl)methyl ester
ctacagtgacctttcccgcta

SEQ ID NO: 934 - RNA, 23 nt, synthetic construct
  source 1..23: mol_type = other RNA
  modified_base 1: mod_base = OTHER; note = 2'-O-methyluridine-3'-phosphorothioate 5'-(E)-Vinylphosphonate
  modified_base 2: mod_base = OTHER; note = 2'-deoxy-2'-fluoroadenosine-3'-phosphorothioate
  modified_base 3: mod_base = OTHER; note = 2'-O-methylguanosine-3'-phosphate
  modified_base 4: mod_base = OTHER; note = 2'-O-methylcytidine-3'-phosphate
  modified_base 5: mod_base = OTHER; note = 2'-O-methylguanosine-3'-phosphate
  modified_base 6: mod_base = OTHER; note = 2'-deoxy-2'-fluoroguanosine-3'-phosphate
  modified_base 7: mod_base = OTHER; note = 2'-O-methylguanosine-3'-phosphate
  modified_base 8: mod_base = OTHER; note = 2'-deoxy-2'-fluoroadenosine-3'-phosphate
  modified_base 9: mod_base = OTHER; note = 2'-deoxy-2'-fluoroadenosine-3'-phosphate
  modified_base 10: mod_base = OTHER; note = 2'-O-methyladenosine-3'-phosphate
  modified_base 11: mod_base = OTHER; note = 2'-O-methylguanosine-3'-phosphate
  modified_base 12: mod_base = OTHER; note = 2'-O-methylguanosine-3'-phosphate
  modified_base 13: mod_base = OTHER; note = 2'-O-methyluridine-3'-phosphate
  modified_base 14: mod_base = OTHER; note = 2'-deoxy-2'-fluorocytidine-3'-phosphate
  modified_base 15: mod_base = OTHER; note = 2'-O-methyladenosine-3'-phosphate
  modified_base 16: mod_base = OTHER; note = 2'-deoxy-2'-fluorocytidine-3'-phosphate
  modified_base 17: mod_base = OTHER; note = 2'-O-methyluridine-3'-phosphate
  modified_base 18: mod_base = OTHER; note = 2'-O-methylguanosine-3'-phosphate
  modified_base 19: mod_base = OTHER; note = 2'-O-methyluridine-3'-phosphate
  modified_base 20: mod_base = OTHER; note = 2'-O-methyladenosine-3'-phosphate
  modified_base 21: mod_base = OTHER; note = 2'-O-methylguanosine-3'-phosphorothioate
  modified_base 22: mod_base = OTHER; note = 2'-O-methylguanosine-3'-phosphorothioate
  modified_base 23: mod_base = OTHER; note = 2'-O-methyluridine
tagcgggaaaggtcactgtaggt

SEQ ID NO: 935 - RNA, 21 nt, synthetic construct
  source 1..21: mol_type = other RNA
  modified_base 1: mod_base = OTHER; note = 2'-O-methyladenosine-3'-phosphorothioate
  modified_base 2: mod_base = OTHER; note = 2'-O-methylguanosine-3'-phosphorothioate
  modified_base 3: mod_base = OTHER; note = 2'-O-methyluridine-3'-phosphate
  modified_base 4: mod_base = OTHER; note = 2'-O-methylcytidine-3'-phosphate
  modified_base 5: mod_base = OTHER; note = 2'-O-methyluridine-3'-phosphate
  modified_base 6: mod_base = OTHER; note = 2'-O-methyluridine-3'-phosphate
  modified_base 7: mod_base = OTHER; note = 2'-deoxy-2'-fluorouridine-3'-phosphate
  modified_base 8: mod_base = OTHER; note = 2'-O-methyluridine-3'-phosphate
  modified_base 9: mod_base = OTHER; note = 2'-deoxy-2'-fluorocytidine-3'-phosphate
  modified_base 10: mod_base = OTHER; note = 2'-deoxy-2'-fluorouridine-3'-phosphate
  modified_base 11: mod_base = OTHER; note = 2'-deoxy-2'-fluorocytidine-3'-phosphate
  modified_base 12: mod_base = OTHER; note = 2'-O-methylcytidine-3'-phosphate
  modified_base 13: mod_base = OTHER; note = 2'-O-methyluridine-3'-phosphate
  modified_base 14: mod_base = OTHER; note = 2'-O-methyladenosine-3'-phosphate
  modified_base 15: mod_base = OTHER; note = 2'-O-methylcytidine-3'-phosphate
  modified_base 16: mod_base = OTHER; note = 2'-O-methyladenosine-3'-phosphate
  modified_base 17: mod_base = OTHER; note = 2'-O-methylguanosine-3'-phosphate
  modified_base 18: mod_base = OTHER; note = 2'-O-methyluridine-3'-phosphate
  modified_base 19: mod_base = OTHER; note = 2'-O-methylguanosine-3'-phosphate
  modified_base 20: mod_base = OTHER; note = 2'-O-methyluridine-3'-phosphate
  modified_base 21: mod_base = OTHER; note = 2'-O-methyladenosine-3'-phosphate ((2S,4R)-1-[29-[[2-(acetylamino)-2-deoxy-beta-D-galactopyra nosyl]oxy]-14,14-bis[[3-[[3-[[5-[[2-(acetylamino)-2-deoxy-b eta-D-galactopyranosyl]oxy]-1-oxopentyl]amino]propyl]amino] -3-oxopropoxy]methyl]-1,12,19,25-tetraoxo-16-oxa-13,20,24-t riazanonacos-1-yl]-4-hydroxy-2-pyrrolidinyl)methyl ester
agtcttttctcctacagtgta

SEQ ID NO: 936 - RNA, 23 nt, synthetic construct
  source 1..23: mol_type = other RNA
  modified_base 1: mod_base = OTHER; note = 2'-O-methyluridine-3'-phosphorothioate 5'-(E)-Vinylphosphonate
  modified_base 2: mod_base = OTHER; note = 2'-deoxy-2'-fluoroadenosine-3'-phosphorothioate
  modified_base 3: mod_base = OTHER; note = 2'-O-methylcytidine-3'-phosphate
  modified_base 4: mod_base = OTHER; note = 2'-O-methyladenosine-3'-phosphate
  modified_base 5: mod_base = OTHER; note = 2'-O-methylcytidine-3'-phosphate
  modified_base 6: mod_base = OTHER; note = 2'-deoxy-2'-fluorouridine-3'-phosphate
  modified_base 7: mod_base = OTHER; note = 2'-O-methylguanosine-3'-phosphate
  modified_base 8: mod_base = OTHER; note = 2'-deoxy-2'-fluorouridine-3'-phosphate
  modified_base 9: mod_base = OTHER; note = 2'-deoxy-2'-fluoroadenosine-3'-phosphate
  modified_base 10: mod_base = OTHER; note = 2'-O-methylguanosine-3'-phosphate
  modified_base 11: mod_base = OTHER; note = 2'-O-methylguanosine-3'-phosphate
  modified_base 12: mod_base = OTHER; note = 2'-O-methyladenosine-3'-phosphate
  modified_base 13: mod_base = OTHER; note = 2'-O-methylguanosine-3'-phosphate
  modified_base 14: mod_base = OTHER; note = 2'-deoxy-2'-fluoroadenosine-3'-phosphate
  modified_base 15: mod_base = OTHER; note = 2'-O-methyladenosine-3'-phosphate
  modified_base 16: mod_base = OTHER; note = 2'-deoxy-2'-fluoroadenosine-3'-phosphate
  modified_base 17: mod_base = OTHER; note = 2'-O-methyladenosine-3'-phosphate
  modified_base 18: mod_base = OTHER; note = 2'-O-methylguanosine-3'-phosphate
  modified_base 19: mod_base = OTHER; note = 2'-O-methyladenosine-3'-phosphate
  modified_base 20: mod_base = OTHER; note = 2'-O-methylcytidine-3'-phosphate
  modified_base 21: mod_base = OTHER; note = 2'-O-methyluridine-3'-phosphorothioate
  modified_base 22: mod_base = OTHER; note = 2'-O-methylcytidine-3'-phosphorothioate
  modified_base 23: mod_base = OTHER; note = 2'-O-methyluridine
tacactgtaggagaaaagactct

SEQ ID NO: 937 - RNA, 21 nt, synthetic construct
  source 1..21: mol_type = other RNA
  modified_base 1: mod_base = OTHER; note = 2'-O-methyladenosine-3'-phosphorothioate
  modified_base 2: mod_base = OTHER; note = 2'-O-methylcytidine-3'-phosphorothioate
  modified_base 3: mod_base = OTHER; note = 2'-O-methyladenosine-3'-phosphate
  modified_base 4: mod_base = OTHER; note = 2'-O-methylguanosine-3'-phosphate
  modified_base 5: mod_base = OTHER; note = 2'-O-methyluridine-3'-phosphate
  modified_base 6: mod_base = OTHER; note = 2'-O-methylguanosine-3'-phosphate
  modified_base 7: mod_base = OTHER; note = 2'-deoxy-2'-fluoroadenosine-3'-phosphate
  modified_base 8: mod_base = OTHER; note = 2'-O-methylcytidine-3'-phosphate
  modified_base 9: mod_base = OTHER; note = 2'-deoxy-2'-fluorocytidine-3'-phosphate
  modified_base 10: mod_base = OTHER; note = 2'-deoxy-2'-fluorouridine-3'-phosphate
  modified_base 11: mod_base = OTHER; note = 2'-deoxy-2'-fluorouridine-3'-phosphate
  modified_base 12: mod_base = OTHER; note = 2'-O-methyluridine-3'-phosphate
  modified_base 13: mod_base = OTHER; note = 2'-O-methylcytidine-3'-phosphate
  modified_base 14: mod_base = OTHER; note = 2'-O-methylcytidine-3'-phosphate
  modified_base 15: mod_base = OTHER; note = 2'-O-methylcytidine-3'-phosphate
  modified_base 16: mod_base = OTHER; note = 2'-O-methylguanosine-3'-phosphate
  modified_base 17: mod_base = OTHER; note = 2'-O-methylcytidine-3'-phosphate
  modified_base 18: mod_base = OTHER; note = 2'-O-methyluridine-3'-phosphate
  modified_base 19: mod_base = OTHER; note = 2'-O-methylcytidine-3'-phosphate
  modified_base 20: mod_base = OTHER; note = 2'-O-methyluridine-3'-phosphate
  modified_base 21: mod_base = OTHER; note = 2'-O-methyladenosine-3'-phosphate ((2S,4R)-1-[29-[[2-(acetylamino)-2-deoxy-beta-D-galactopyra nosyl]oxy]-14,14-bis[[3-[[3-[[5-[[2-(acetylamino)-2-deoxy-b eta-D-galactopyranosyl]oxy]-1-oxopentyl]amino]propyl]amino] -3-oxopropoxy]methyl]-1,12,19,25-tetraoxo-16-oxa-13,20,24-t riazanonacos-1-yl]-4-hydroxy-2-pyrrolidinyl)methyl ester
acagtgacctttcccgctcta

SEQ ID NO: 938 - RNA, 23 nt, synthetic construct
  source 1..23: mol_type = other RNA
  modified_base 1: mod_base = OTHER; note = 2'-O-methyluridine-3'-phosphorothioate 5'-(E)-Vinylphosphonate
  modified_base 2: mod_base = OTHER; note = 2'-deoxy-2'-fluoroadenosine-3'-phosphorothioate
  modified_base 3: mod_base = OTHER; note = 2'-O-methylguanosine-3'-phosphate
  modified_base 4: mod_base = OTHER; note = 2'-O-methyladenosine-3'-phosphate
  modified_base 5: mod_base = OTHER; note = 2'-O-methylguanosine-3'-phosphate
  modified_base 6: mod_base = OTHER; note = 2'-deoxy-2'-fluorocytidine-3'-phosphate
  modified_base 7: mod_base = OTHER; note = 2'-O-methylguanosine-3'-phosphate
  modified_base 8: mod_base = OTHER; note = 2'-deoxy-2'-fluoroguanosine-3'-phosphate
  modified_base 9: mod_base = OTHER; note = 2'-deoxy-2'-fluoroguanosine-3'-phosphate
  modified_base 10: mod_base = OTHER; note = 2'-O-methyladenosine-3'-phosphate
  modified_base 11: mod_base = OTHER; note = 2'-O-methyladenosine-3'-phosphate
  modified_base 12: mod_base = OTHER; note = 2'-O-methyladenosine-3'-phosphate
  modified_base 13: mod_base = OTHER; note = 2'-O-methylguanosine-3'-phosphate
  modified_base 14: mod_base = OTHER; note = 2'-deoxy-2'-fluoroguanosine-3'-phosphate
  modified_base 15: mod_base = OTHER; note = 2'-O-methyluridine-3'-phosphate
  modified_base 16: mod_base = OTHER; note = 2'-deoxy-2'-fluorocytidine-3'-phosphate
  modified_base 17: mod_base = OTHER; note = 2'-O-methyladenosine-3'-phosphate
  modified_base 18: mod_base = OTHER; note = 2'-O-methylcytidine-3'-phosphate
  modified_base 19: mod_base = OTHER; note = 2'-O-methyluridine-3'-phosphate
  modified_base 20: mod_base = OTHER; note = 2'-O-methylguanosine-3'-phosphate
  modified_base 21: mod_base = OTHER; note = 2'-O-methyluridine-3'-phosphorothioate
  modified_base 22: mod_base = OTHER; note = 2'-O-methyladenosine-3'-phosphorothioate
  modified_base 23: mod_base = OTHER; note = 2'-O-methylguanosine
tagagcgggaaaggtcactgtag

SEQ ID NO: 939 - RNA, 21 nt, synthetic construct
  source 1..21: mol_type = other RNA
  modified_base 1: mod_base = OTHER; note = 2'-O-methylcytidine-3'-phosphorothioate
  modified_base 2: mod_base = OTHER; note = 2'-O-methyladenosine-3'-phosphorothioate
  modified_base 3: mod_base = OTHER; note = 2'-O-methylcytidine-3'-phosphate
  modified_base 4: mod_base = OTHER; note = 2'-O-methylcytidine-3'-phosphate
  modified_base 5: mod_base = OTHER; note = 2'-O-methyladenosine-3'-phosphate
  modified_base 6: mod_base = OTHER; note = 2'-O-methylguanosine-3'-phosphate
  modified_base 7: mod_base = OTHER; note = 2'-deoxy-2'-fluorocytidine-3'-phosphate
  modified_base 8: mod_base = OTHER; note = 2'-O-methylcytidine-3'-phosphate
  modified_base 9: mod_base = OTHER; note = 2'-deoxy-2'-fluorouridine-3'-phosphate
  modified_base 10: mod_base = OTHER; note = 2'-deoxy-2'-fluorouridine-3'-phosphate
  modified_base 11: mod_base = OTHER; note = 2'-deoxy-2'-fluorocytidine-3'-phosphate
  modified_base 12: mod_base = OTHER; note = 2'-O-methyluridine-3'-phosphate
  modified_base 13: mod_base = OTHER; note = 2'-O-methyluridine-3'-phosphate
  modified_base 14: mod_base = OTHER; note = 2'-O-methyluridine-3'-phosphate
  modified_base 15: mod_base = OTHER; note = 2'-O-methylcytidine-3'-phosphate
  modified_base 16: mod_base = OTHER; note = 2'-O-methyladenosine-3'-phosphate
  modified_base 17: mod_base = OTHER; note = 2'-O-methylguanosine-3'-phosphate
  modified_base 18: mod_base = OTHER; note = 2'-O-methyladenosine-3'-phosphate
  modified_base 19: mod_base = OTHER; note = 2'-O-methyladenosine-3'-phosphate
  modified_base 20: mod_base = OTHER; note = 2'-O-methylguanosine-3'-phosphate
  modified_base 21: mod_base = OTHER; note = 2'-O-methyladenosine-3'-phosphate ((2S,4R)-1-[29-[[2-(acetylamino)-2-deoxy-beta-D-galactopyra nosyl]oxy]-14,14-bis[[3-[[3-[[5-[[2-(acetylamino)-2-deoxy-b eta-D-galactopyranosyl]oxy]-1-oxopentyl]amino]propyl]amino] -3-oxopropoxy]methyl]-1,12,19,25-tetraoxo-16-oxa-13,20,24-t riazanonacos-1-yl]-4-hydroxy-2-pyrrolidinyl)methyl ester
caccagccttctttcagaaga

SEQ ID NO: 940 - RNA, 23 nt, synthetic construct
  source 1..23: mol_type = other RNA
  modified_base 1: mod_base = OTHER; note = 2'-O-methyluridine-3'-phosphorothioate 5'-(E)-Vinylphosphonate
  modified_base 2: mod_base = OTHER; note = 2'-deoxy-2'-fluorocytidine-3'-phosphorothioate
  modified_base 3: mod_base = OTHER; note = 2'-O-methyluridine-3'-phosphate
  modified_base 4: mod_base = OTHER; note = 2'-O-methyluridine-3'-phosphate
  modified_base 5: mod_base = OTHER; note = 2'-O-methylcytidine-3'-phosphate
  modified_base 6: mod_base = OTHER; note = 2'-deoxy-2'-fluorouridine-3'-phosphate
  modified_base 7: mod_base = OTHER; note = 2'-O-methylguanosine-3'-phosphate
  modified_base 8: mod_base = OTHER; note = 2'-deoxy-2'-fluoroadenosine-3'-phosphate
  modified_base 9: mod_base = OTHER; note = 2'-deoxy-2'-fluoroadenosine-3'-phosphate
  modified_base 10: mod_base = OTHER; note = 2'-O-methyladenosine-3'-phosphate
  modified_base 11: mod_base = OTHER; note = 2'-O-methylguanosine-3'-phosphate
  modified_base 12: mod_base = OTHER; note = 2'-O-methyladenosine-3'-phosphate
  modified_base 13: mod_base = OTHER; note = 2'-O-methyladenosine-3'-phosphate
  modified_base 14: mod_base = OTHER; note = 2'-deoxy-2'-fluoroguanosine-3'-phosphate
  modified_base 15: mod_base = OTHER; note = 2'-O-methylguanosine-3'-phosphate
  modified_base 16: mod_base = OTHER; note = 2'-deoxy-2'-fluorocytidine-3'-phosphate
  modified_base 17: mod_base = OTHER; note = 2'-O-methyluridine-3'-phosphate
  modified_base 18: mod_base = OTHER; note = 2'-O-methylguanosine-3'-phosphate
  modified_base 19: mod_base = OTHER; note = 2'-O-methylguanosine-3'-phosphate
  modified_base 20: mod_base = OTHER; note = 2'-O-methyluridine-3'-phosphate
  modified_base 21: mod_base = OTHER; note = 2'-O-methylguanosine-3'-phosphorothioate
  modified_base 22: mod_base = OTHER; note = 2'-O-methyladenosine-3'-phosphorothioate
  modified_base 23: mod_base = OTHER; note = 2'-O-methyladenosine
tcttctgaaagaaggctggtgaa

SEQ ID NO: 941 - RNA, 21 nt, synthetic construct
  source 1..21: mol_type = other RNA
  modified_base 1: mod_base = OTHER; note = 2'-O-methylguanosine-3'-phosphorothioate
  modified_base 2: mod_base = OTHER; note = 2'-O-methyladenosine-3'-phosphorothioate
  modified_base 3: mod_base = OTHER; note = 2'-O-methyladenosine-3'-phosphate
  modified_base 4: mod_base = OTHER; note = 2'-O-methyluridine-3'-phosphate
  modified_base 5: mod_base = OTHER; note = 2'-O-methyluridine-3'-phosphate
  modified_base 6: mod_base = OTHER; note = 2'-O-methyluridine-3'-phosphate
  modified_base 7: mod_base = OTHER; note = 2'-deoxy-2'-fluorouridine-3'-phosphate
  modified_base 8: mod_base = OTHER; note = 2'-O-methylguanosine-3'-phosphate
  modified_base 9: mod_base = OTHER; note = 2'-deoxy-2'-fluoroguanosine-3'-phosphate
  modified_base 10: mod_base = OTHER; note = 2'-deoxy-2'-fluoroguanosine-3'-phosphate
  modified_base 11: mod_base = OTHER; note = 2'-deoxy-2'-fluorouridine-3'-phosphate
  modified_base 12: mod_base = OTHER; note = 2'-O-methylcytidine-3'-phosphate
  modified_base 13: mod_base = OTHER; note = 2'-O-methyladenosine-3'-phosphate
  modified_base 14: mod_base = OTHER; note = 2'-O-methyladenosine-3'-phosphate
  modified_base 15: mod_base = OTHER; note = 2'-O-methyluridine-3'-phosphate
  modified_base 16: mod_base = OTHER; note = 2'-O-methylguanosine-3'-phosphate
  modified_base 17: mod_base = OTHER; note = 2'-O-methylguanosine-3'-phosphate
  modified_base 18: mod_base = OTHER; note = 2'-O-methyladenosine-3'-phosphate
  modified_base 19: mod_base = OTHER; note = 2'-O-methyladenosine-3'-phosphate
  modified_base 20: mod_base = OTHER; note = 2'-O-methyladenosine-3'-phosphate
  modified_base 21: mod_base = OTHER; note = 2'-O-methyladenosine-3'-phosphate ((2S,4R)-1-[29-[[2-(acetylamino)-2-deoxy-beta-D-galactopyra nosyl]oxy]-14,14-bis[[3-[[3-[[5-[[2-(acetylamino)-2-deoxy-b eta-D-galactopyranosyl]oxy]-1-oxopentyl]amino]propyl]amino] -3-oxopropoxy]methyl]-1,12,19,25-tetraoxo-16-oxa-13,20,24-t riazanonacos-1-yl]-4-hydroxy-2-pyrrolidinyl)methyl ester
gaattttgggtcaatggaaaa

SEQ ID NO: 942 - RNA, 23 nt, synthetic construct
  source 1..23: mol_type = other RNA
  modified_base 1: mod_base = OTHER; note = 2'-O-methyluridine-3'-phosphorothioate 5'-(E)-Vinylphosphonate
  modified_base 2: mod_base = OTHER; note = 2'-deoxy-2'-fluorouridine-3'-phosphorothioate
  modified_base 3: mod_base = OTHER; note = 2'-O-methyluridine-3'-phosphate
  modified_base 4: mod_base = OTHER; note = 2'-O-methyluridine-3'-phosphate
  modified_base 5: mod_base = OTHER; note = 2'-O-methylcytidine-3'-phosphate
  modified_base 6: mod_base = OTHER; note = 2'-deoxy-2'-fluorocytidine-3'-phosphate
  modified_base 7: mod_base = OTHER; note = 2'-O-methyladenosine-3'-phosphate
  modified_base 8: mod_base = OTHER; note = 2'-deoxy-2'-fluorouridine-3'-phosphate
  modified_base 9: mod_base = OTHER; note = 2'-deoxy-2'-fluorouridine-3'-phosphate
  modified_base 10: mod_base = OTHER; note = 2'-O-methylguanosine-3'-phosphate
  modified_base 11: mod_base = OTHER; note = 2'-O-methyladenosine-3'-phosphate
  modified_base 12: mod_base = OTHER; note = 2'-O-methylcytidine-3'-phosphate
  modified_base 13: mod_base = OTHER; note = 2'-O-methylcytidine-3'-phosphate
  modified_base 14: mod_base = OTHER; note = 2'-deoxy-2'-fluorocytidine-3'-phosphate
  modified_base 15: mod_base = OTHER; note = 2'-O-methyladenosine-3'-phosphate
  modified_base 16: mod_base = OTHER; note = 2'-deoxy-2'-fluoroadenosine-3'-phosphate
  modified_base 17: mod_base = OTHER; note = 2'-O-methyladenosine-3'-phosphate
  modified_base 18: mod_base = OTHER; note = 2'-O-methyladenosine-3'-phosphate
  modified_base 19: mod_base = OTHER; note = 2'-O-methyluridine-3'-phosphate
  modified_base 20: mod_base = OTHER; note = 2'-O-methyluridine-3'-phosphate
  modified_base 21: mod_base = OTHER; note = 2'-O-methylcytidine-3'-phosphorothioate
  modified_base 22: mod_base = OTHER; note = 2'-O-methyladenosine-3'-phosphorothioate
  modified_base 23: mod_base = OTHER; note = 2'-O-methyladenosine
ttttccattgacccaaaattcaa

SEQ ID NO: 943 - RNA, 21 nt, synthetic construct
  source 1..21: mol_type = other RNA
  modified_base 1: mod_base = OTHER; note = 2'-O-methyluridine-3'-phosphorothioate
  modified_base 2: mod_base = OTHER; note = 2'-O-methylcytidine-3'-phosphorothioate
  modified_base 3: mod_base = OTHER; note = 2'-O-methyladenosine-3'-phosphate
  modified_base 4: mod_base = OTHER; note = 2'-O-methylcytidine-3'-phosphate
  modified_base 5: mod_base = OTHER; note = 2'-O-methylcytidine-3'-phosphate
  modified_base 6: mod_base = OTHER; note = 2'-O-methyladenosine-3'-phosphate
  modified_base 7: mod_base = OTHER; note = 2'-deoxy-2'-fluoroguanosine-3'-phosphate
  modified_base 8: mod_base = OTHER; note = 2'-O-methylcytidine-3'-phosphate
  modified_base 9: mod_base = OTHER; note = 2'-deoxy-2'-fluorocytidine-3'-phosphate
  modified_base 10: mod_base = OTHER; note = 2'-deoxy-2'-fluorouridine-3'-phosphate
  modified_base 11: mod_base = OTHER; note = 2'-deoxy-2'-fluorouridine-3'-phosphate
  modified_base 12: mod_base = OTHER; note = 2'-O-methylcytidine-3'-phosphate
  modified_base 13: mod_base = OTHER; note = 2'-O-methyluridine-3'-phosphate
  modified_base 14: mod_base = OTHER; note = 2'-O-methyluridine-3'-phosphate
  modified_base 15: mod_base = OTHER; note = 2'-O-methyluridine-3'-phosphate
  modified_base 16: mod_base = OTHER; note = 2'-O-methylcytidine-3'-phosphate
  modified_base 17: mod_base = OTHER; note = 2'-O-methyladenosine-3'-phosphate
  modified_base 18: mod_base = OTHER; note = 2'-O-methylguanosine-3'-phosphate
  modified_base 19: mod_base = OTHER; note = 2'-O-methyladenosine-3'-phosphate
  modified_base 20: mod_base = OTHER; note = 2'-O-methyladenosine-3'-phosphate
  modified_base 21: mod_base = OTHER; note = 2'-O-methyladenosine-3'-phosphate ((2S,4R)-1-[29-[[2-(acetylamino)-2-deoxy-beta-D-galactopyra nosyl]oxy]-14,14-bis[[3-[[3-[[5-[[2-(acetylamino)-2-deoxy-b eta-D-galactopyranosyl]oxy]-1-oxopentyl]amino]propyl]amino] -3-oxopropoxy]methyl]-1,12,19,25-tetraoxo-16-oxa-13,20,24-t riazanonacos-1-yl]-4-hydroxy-2-pyrrolidinyl)methyl ester
tcaccagccttctttcagaaa

SEQ ID NO: 944 - RNA, 23 nt, synthetic construct
  source 1..23: mol_type = other RNA
  modified_base 1: mod_base = OTHER; note = 2'-O-methyluridine-3'-phosphorothioate 5'-(E)-Vinylphosphonate
  modified_base 2: mod_base = OTHER; note = 2'-deoxy-2'-fluorouridine-3'-phosphorothioate
  modified_base 3: mod_base = OTHER; note = 2'-O-methyluridine-3'-phosphate
  modified_base 4: mod_base = OTHER; note = 2'-O-methylcytidine-3'-phosphate
  modified_base 5: mod_base = OTHER; note = 2'-O-methyluridine-3'-phosphate
  modified_base 6: mod_base = OTHER; note = 2'-deoxy-2'-fluoroguanosine-3'-phosphate
  modified_base 7: mod_base = OTHER; note = 2'-O-methyladenosine-3'-phosphate
  modified_base 8: mod_base = OTHER; note = 2'-deoxy-2'-fluoroadenosine-3'-phosphate
  modified_base 9: mod_base = OTHER; note = 2'-deoxy-2'-fluoroadenosine-3'-phosphate
  modified_base 10: mod_base = OTHER; note = 2'-O-methylguanosine-3'-phosphate
  modified_base 11: mod_base = OTHER; note = 2'-O-methyladenosine-3'-phosphate
  modified_base 12: mod_base = OTHER; note = 2'-O-methyladenosine-3'-phosphate
  modified_base 13: mod_base = OTHER; note = 2'-O-methylguanosine-3'-phosphate
  modified_base 14: mod_base = OTHER; note = 2'-deoxy-2'-fluoroguanosine-3'-phosphate
  modified_base 15: mod_base = OTHER; note = 2'-O-methylcytidine-3'-phosphate
  modified_base 16: mod_base = OTHER; note = 2'-deoxy-2'-fluorouridine-3'-phosphate
  modified_base 17: mod_base = OTHER; note = 2'-O-methylguanosine-3'-phosphate
  modified_base 18: mod_base = OTHER; note = 2'-O-methylguanosine-3'-phosphate
  modified_base 19: mod_base = OTHER; note = 2'-O-methyluridine-3'-phosphate
  modified_base 20: mod_base = OTHER; note = 2'-O-methylguanosine-3'-phosphate
  modified_base 21: mod_base = OTHER; note = 2'-O-methyladenosine-3'-phosphorothioate
  modified_base 22: mod_base = OTHER; note = 2'-O-methyladenosine-3'-phosphorothioate
  modified_base 23: mod_base = OTHER; note = 2'-O-methylguanosine
tttctgaaagaaggctggtgaag

SEQ ID NO: 945 - RNA, 21 nt, synthetic construct
  source 1..21: mol_type = other RNA
  modified_base 1: mod_base = OTHER; note = 2'-O-methylcytidine-3'-phosphorothioate
  modified_base 2: mod_base = OTHER; note = 2'-O-methyluridine-3'-phosphorothioate
  modified_base 3: mod_base = OTHER; note = 2'-O-methyluridine-3'-phosphate
  modified_base 4: mod_base = OTHER; note = 2'-O-methyluridine-3'-phosphate
  modified_base 5: mod_base = OTHER; note = 2'-O-methyluridine-3'-phosphate
  modified_base 6: mod_base = OTHER; note = 2'-O-methylcytidine-3'-phosphate
  modified_base 7: mod_base = OTHER; note = 2'-deoxy-2'-fluorouridine-3'-phosphate
  modified_base 8: mod_base = OTHER; note = 2'-O-methylcytidine-3'-phosphate
  modified_base 9: mod_base = OTHER; note = 2'-deoxy-2'-fluorocytidine-3'-phosphate
  modified_base 10: mod_base = OTHER; note = 2'-deoxy-2'-fluorouridine-3'-phosphate
  modified_base 11: mod_base = OTHER; note = 2'-deoxy-2'-fluoroadenosine-3'-phosphate
  modified_base 12: mod_base = OTHER; note = 2'-O-methylcytidine-3'-phosphate
  modified_base 13: mod_base = OTHER; note = 2'-O-methyladenosine-3'-phosphate
  modified_base 14: mod_base = OTHER; note = 2'-O-methylguanosine-3'-phosphate
  modified_base 15: mod_base = OTHER; note = 2'-O-methyluridine-3'-phosphate
  modified_base 16: mod_base = OTHER; note = 2'-O-methylguanosine-3'-phosphate
  modified_base 17: mod_base = OTHER; note = 2'-O-methyluridine-3'-phosphate
  modified_base 18: mod_base = OTHER; note = 2'-O-methylcytidine-3'-phosphate
  modified_base 19: mod_base = OTHER; note = 2'-O-methyladenosine-3'-phosphate
  modified_base 20: mod_base = OTHER; note = 2'-O-methyladenosine-3'-phosphate
  modified_base 21: mod_base = OTHER; note = 2'-O-methyladenosine-3'-phosphate ((2S,4R)-1-[29-[[2-(acetylamino)-2-deoxy-beta-D-galactopyra nosyl]oxy]-14,14-bis[[3-[[3-[[5-[[2-(acetylamino)-2-deoxy-b eta-D-galactopyranosyl]oxy]-1-oxopentyl]amino]propyl]amino] -3-oxopropoxy]methyl]-1,12,19,25-tetraoxo-16-oxa-13,20,24-t riazanonacos-1-yl]-4-hydroxy-2-pyrrolidinyl)methyl ester
cttttctcctacagtgtcaaa

SEQ ID NO: 946 - RNA, 23 nt, synthetic construct
  source 1..23: mol_type = other RNA
  modified_base 1: mod_base = OTHER; note = 2'-O-methyluridine-3'-phosphorothioate 5'-(E)-Vinylphosphonate
  modified_base 2: mod_base = OTHER; note = 2'-deoxy-2'-fluorouridine-3'-phosphorothioate
  modified_base 3: mod_base = OTHER; note = 2'-O-methyluridine-3'-phosphate
  modified_base 4: mod_base = OTHER; note = 2'-O-methylguanosine-3'-phosphate
  modified_base 5: mod_base = OTHER; note = 2'-O-methyladenosine-3'-phosphate
  modified_base 6: mod_base = OTHER; note = 2'-deoxy-2'-fluorocytidine-3'-phosphate
  modified_base 7: mod_base = OTHER; note = 2'-O-methyladenosine-3'-phosphate
  modified_base 8: mod_base = OTHER; note = 2'-deoxy-2'-fluorocytidine-3'-phosphate
  modified_base 9: mod_base = OTHER; note = 2'-deoxy-2'-fluorouridine-3'-phosphate
  modified_base 10: mod_base = OTHER; note = 2'-O-methylguanosine-3'-phosphate
  modified_base 11: mod_base = OTHER; note = 2'-O-methyluridine-3'-phosphate
  modified_base 12: mod_base = OTHER; note = 2'-O-methyladenosine-3'-phosphate
  modified_base 13: mod_base = OTHER; note = 2'-O-methylguanosine-3'-phosphate
  modified_base 14: mod_base = OTHER; note = 2'-deoxy-2'-fluoroguanosine-3'-phosphate
  modified_base 15: mod_base = OTHER; note = 2'-O-methyladenosine-3'-phosphate
  modified_base 16: mod_base = OTHER; note = 2'-deoxy-2'-fluoroguanosine-3'-phosphate
  modified_base 17: mod_base = OTHER; note = 2'-O-methyladenosine-3'-phosphate
  modified_base 18: mod_base = OTHER; note = 2'-O-methyladenosine-3'-phosphate
  modified_base 19: mod_base = OTHER; note = 2'-O-methyladenosine-3'-phosphate
  modified_base 20: mod_base = OTHER; note = 2'-O-methyladenosine-3'-phosphate
  modified_base 21: mod_base = OTHER; note = 2'-O-methylguanosine-3'-phosphorothioate
  modified_base 22: mod_base = OTHER; note = 2'-O-methyladenosine-3'-phosphorothioate
  modified_base 23: mod_base = OTHER; note = 2'-O-methylcytidine
tttgacactgtaggagaaaagac

SEQ ID NO: 947 - RNA, 21 nt, synthetic construct
  source 1..21: mol_type = other RNA
  modified_base 1: mod_base = OTHER; note = 2'-O-methyladenosine-3'-phosphorothioate
  modified_base 2: mod_base = OTHER; note = 2'-O-methylcytidine-3'-phosphorothioate
  modified_base 3: mod_base = OTHER; note = 2'-O-methylcytidine-3'-phosphate
  modified_base 4: mod_base = OTHER; note = 2'-O-methyluridine-3'-phosphate
  modified_base 5: mod_base = OTHER; note = 2'-O-methyladenosine-3'-phosphate
  modified_base 6: mod_base = OTHER; note = 2'-O-methylcytidine-3'-phosphate
  modified_base 7: mod_base = OTHER; note = 2'-deoxy-2'-fluoroadenosine-3'-phosphate
  modified_base 8: mod_base = OTHER; note = 2'-O-methylguanosine-3'-phosphate
  modified_base 9: mod_base = OTHER; note = 2'-deoxy-2'-fluorouridine-3'-phosphate
  modified_base 10: mod_base = OTHER; note = 2'-deoxy-2'-fluoroguanosine-3'-phosphate
  modified_base 11: mod_base = OTHER; note = 2'-deoxy-2'-fluoroadenosine-3'-phosphate
  modified_base 12: mod_base = OTHER; note = 2'-O-methylcytidine-3'-phosphate
  modified_base 13: mod_base = OTHER; note = 2'-O-methylcytidine-3'-phosphate
  modified_base 14: mod_base = OTHER; note = 2'-O-methyluridine-3'-phosphate
  modified_base 15: mod_base = OTHER; note = 2'-O-methyluridine-3'-phosphate
  modified_base 16: mod_base = OTHER; note = 2'-O-methyluridine-3'-phosphate
  modified_base 17: mod_base = OTHER; note = 2'-O-methylcytidine-3'-phosphate
  modified_base 18: mod_base = OTHER; note = 2'-O-methylcytidine-3'-phosphate
  modified_base 19: mod_base = OTHER; note = 2'-O-methylcytidine-3'-phosphate
  modified_base 20: mod_base = OTHER; note = 2'-O-methylguanosine-3'-phosphate
  modified_base 21: mod_base = OTHER; note = 2'-O-methyladenosine-3'-phosphate ((2S,4R)-1-[29-[[2-(acetylamino)-2-deoxy-beta-D-galactopyra nosyl]oxy]-14,14-bis[[3-[[3-[[5-[[2-(acetylamino)-2-deoxy-b eta-D-galactopyranosyl]oxy]-1-oxopentyl]amino]propyl]amino] -3-oxopropoxy]methyl]-1,12,19,25-tetraoxo-16-oxa-13,20,24-t riazanonacos-1-yl]-4-hydroxy-2-pyrrolidinyl)methyl ester
acctacagtgacctttcccga

SEQ ID NO: 948 - RNA, 23 nt, synthetic construct
  source 1..23: mol_type = other RNA
  modified_base 1: mod_base = OTHER; note = 2'-O-methyluridine-3'-phosphorothioate 5'-(E)-Vinylphosphonate
  modified_base 2: mod_base = OTHER; note = 2'-deoxy-2'-fluorocytidine-3'-phosphorothioate
  modified_base 3: mod_base = OTHER; note = 2'-O-methylguanosine-3'-phosphate
  modified_base 4: mod_base = OTHER; note = 2'-O-methylguanosine-3'-phosphate
  modified_base 5: mod_base = OTHER; note = 2'-O-methylguanosine-3'-phosphate
  modified_base 6: mod_base = OTHER; note = 2'-deoxy-2'-fluoroadenosine-3'-phosphate
  modified_base 7: mod_base = OTHER; note = 2'-O-methyladenosine-3'-phosphate
  modified_base 8: mod_base = OTHER; note = 2'-deoxy-2'-fluoroadenosine-3'-phosphate
  modified_base 9: mod_base = OTHER; note = 2'-deoxy-2'-fluoroguanosine-3'-phosphate
  modified_base 10: mod_base = OTHER; note = 2'-O-methylguanosine-3'-phosphate
  modified_base 11: mod_base = OTHER; note = 2'-O-methyluridine-3'-phosphate
  modified_base 12: mod_base = OTHER; note = 2'-O-methylcytidine-3'-phosphate
  modified_base 13: mod_base = OTHER; note = 2'-O-methyladenosine-3'-phosphate
  modified_base 14: mod_base = OTHER; note = 2'-deoxy-2'-fluorocytidine-3'-phosphate
  modified_base 15: mod_base = OTHER; note = 2'-O-methyluridine-3'-phosphate
  modified_base 16: mod_base = OTHER; note = 2'-deoxy-2'-fluoroguanosine-3'-phosphate
  modified_base 17: mod_base = OTHER; note = 2'-O-methyluridine-3'-phosphate
  modified_base 18: mod_base = OTHER; note = 2'-O-methyladenosine-3'-phosphate
  modified_base 19: mod_base = OTHER; note = 2'-O-methylguanosine-3'-phosphate
  modified_base 20: mod_base = OTHER; note = 2'-O-methylguanosine-3'-phosphate
  modified_base 21: mod_base = OTHER; note = 2'-O-methyluridine-3'-phosphorothioate
  modified_base 22: mod_base = OTHER; note = 2'-O-methyluridine-3'-phosphorothioate
  modified_base 23: mod_base = OTHER; note = 2'-O-methylcytidine
tcgggaaaggtcactgtaggttc

SEQ ID NO: 949 - RNA, 21 nt, synthetic construct
  source 1..21: mol_type = other RNA
  modified_base 1: mod_base = OTHER; note = 2'-O-methyluridine-3'-phosphorothioate
  modified_base 2: mod_base = OTHER; note = 2'-O-methylcytidine-3'-phosphorothioate
  modified_base 3: mod_base = OTHER; note = 2'-O-methyladenosine-3'-phosphate
  modified_base 4: mod_base = OTHER; note = 2'-O-methyladenosine-3'-phosphate
  modified_base 5: mod_base = OTHER; note = 2'-O-methyladenosine-3'-phosphate
  modified_base 6: mod_base = OTHER; note = 2'-O-methyladenosine-3'-phosphate
  modified_base 7: mod_base = OTHER; note = 2'-deoxy-2'-fluoroguanosine-3'-phosphate
  modified_base 8: mod_base = OTHER; note = 2'-O-methyluridine-3'-phosphate
  modified_base 9: mod_base = OTHER; note = 2'-deoxy-2'-fluorocytidine-3'-phosphate
  modified_base 10: mod_base = OTHER; note = 2'-deoxy-2'-fluoroadenosine-3'-phosphate
  modified_base 11: mod_base = OTHER; note = 2'-deoxy-2'-fluorocytidine-3'-phosphate
  modified_base 12: mod_base = OTHER; note = 2'-O-methyladenosine-3'-phosphate
  modified_base 13: mod_base = OTHER; note = 2'-O-methylguanosine-3'-phosphate
  modified_base 14: mod_base = OTHER; note = 2'-O-methyluridine-3'-phosphate
  modified_base 15: mod_base = OTHER; note = 2'-O-methylcytidine-3'-phosphate
  modified_base 16: mod_base = OTHER; note = 2'-O-methylcytidine-3'-phosphate
  modified_base 17: mod_base = OTHER; note = 2'-O-methylguanosine-3'-phosphate
  modified_base 18: mod_base = OTHER; note = 2'-O-methyluridine-3'-phosphate
  modified_base 19: mod_base = OTHER; note = 2'-O-methylguanosine-3'-phosphate
  modified_base 20: mod_base = OTHER; note = 2'-O-methylguanosine-3'-phosphate
  modified_base 21: mod_base = OTHER; note = 2'-O-methyladenosine-3'-phosphate ((2S,4R)-1-[29-[[2-(acetylamino)-2-deoxy-beta-D-galactopyra nosyl]oxy]-14,14-bis[[3-[[3-[[5-[[2-(acetylamino)-2-deoxy-b eta-D-galactopyranosyl]oxy]-1-oxopentyl]amino]propyl]amino] -3-oxopropoxy]methyl]-1,12,19,25-tetraoxo-16-oxa-13,20,24-t riazanonacos-1-yl]-4-hydroxy-2-pyrrolidinyl)methyl ester
tcaaaagtcacagtccgtgga

SEQ ID NO: 950 - RNA, 23 nt, synthetic construct
  source 1..23: mol_type = other RNA
  modified_base 1: mod_base = OTHER; note = 2'-O-methyluridine-3'-phosphorothioate 5'-(E)-Vinylphosphonate
  modified_base 2: mod_base = OTHER; note = 2'-deoxy-2'-fluorocytidine-3'-phosphorothioate
  modified_base 3: mod_base = OTHER; note = 2'-O-methylcytidine-3'-phosphate
  modified_base 4: mod_base = OTHER; note = 2'-O-methyladenosine-3'-phosphate
  modified_base 5: mod_base = OTHER; note = 2'-O-methylcytidine-3'-phosphate
  modified_base 6: mod_base = OTHER; note = 2'-deoxy-2'-fluoroguanosine-3'-phosphate
  modified_base 7: mod_base = OTHER; note = 2'-O-methylguanosine-3'-phosphate
  modified_base 8: mod_base = OTHER; note = 2'-deoxy-2'-fluoroadenosine-3'-phosphate
  modified_base 9: mod_base = OTHER; note = 2'-deoxy-2'-fluorocytidine-3'-phosphate
  modified_base 10: mod_base = OTHER; note = 2'-O-methyluridine-3'-phosphate
  modified_base 11: mod_base = OTHER; note = 2'-O-methylguanosine-3'-phosphate
  modified_base 12: mod_base = OTHER; note = 2'-O-methyluridine-3'-phosphate
  modified_base 13: mod_base = OTHER; note = 2'-O-methylguanosine-3'-phosphate
  modified_base 14: mod_base = OTHER; note = 2'-deoxy-2'-fluoroadenosine-3'-phosphate
  modified_base 15: mod_base = OTHER; note = 2'-O-methylcytidine-3'-phosphate
  modified_base 16: mod_base = OTHER; note = 2'-deoxy-2'-fluorouridine-3'-phosphate
  modified_base 17: mod_base = OTHER; note = 2'-O-methyluridine-3'-phosphate
  modified_base 18: mod_base = OTHER; note = 2'-O-methyluridine-3'-phosphate
  modified_base 19: mod_base = OTHER; note = 2'-O-methyluridine-3'-phosphate
  modified_base 20: mod_base = OTHER; note = 2'-O-methylguanosine-3'-phosphate
  modified_base 21: mod_base = OTHER; note = 2'-O-methyladenosine-3'-phosphorothioate
  modified_base 22: mod_base = OTHER; note = 2'-O-methyluridine-3'-phosphorothioate
  modified_base 23: mod_base = OTHER; note = 2'-O-methyluridine
tccacggactgtgacttttgatt

SEQ ID NO: 951 - RNA, 21 nt, synthetic construct
  source 1..21: mol_type = other RNA
  modified_base 1: mod_base = OTHER; note = 2'-O-methyluridine-3'-phosphorothioate
  modified_base 2: mod_base = OTHER; note = 2'-O-methyluridine-3'-phosphorothioate
  modified_base 3: mod_base = OTHER; note = 2'-O-methyluridine-3'-phosphate
  modified_base 4: mod_base = OTHER; note = 2'-O-methylcytidine-3'-phosphate
  modified_base 5: mod_base = OTHER; note = 2'-O-methylcytidine-3'-phosphate
  modified_base 6: mod_base = OTHER; note = 2'-O-methylcytidine-3'-phosphate
  modified_base 7: mod_base = OTHER; note = 2'-deoxy-2'-fluoroguanosine-3'-phosphate
  modified_base 8: mod_base = OTHER; note = 2'-O-methylcytidine-3'-phosphate
  modified_base 9: mod_base = OTHER; note = 2'-deoxy-2'-fluorouridine-3'-phosphate
  modified_base 10: mod_base = OTHER; note = 2'-deoxy-2'-fluorocytidine-3'-phosphate
  modified_base 11: mod_base = OTHER; note = 2'-deoxy-2'-fluorouridine-3'-phosphate
  modified_base 12: mod_base = OTHER; note = 2'-O-methylcytidine-3'-phosphate
  modified_base 13: mod_base = OTHER; note = 2'-O-methyladenosine-3'-phosphate
  modified_base 14: mod_base = OTHER; note = 2'-O-methylguanosine-3'-phosphate
  modified_base 15: mod_base = OTHER; note = 2'-O-methyladenosine-3'-phosphate
  modified_base 16: mod_base = OTHER; note = 2'-O-methylguanosine-3'-phosphate
  modified_base 17: mod_base = OTHER; note = 2'-O-methyluridine-3'-phosphate
  modified_base 18: mod_base = OTHER; note = 2'-O-methylcytidine-3'-phosphate
  modified_base 19: mod_base = OTHER; note = 2'-O-methyluridine-3'-phosphate
  modified_base 20: mod_base = OTHER; note = 2'-O-methyluridine-3'-phosphate
  modified_base 21: mod_base = OTHER; note = 2'-O-methyladenosine-3'-phosphate ((2S,4R)-1-[29-[[2-(acetylamino)-2-deoxy-beta-D-galactopyra nosyl]oxy]-14,14-bis[[3-[[3-[[5-[[2-(acetylamino)-2-deoxy-b eta-D-galactopyranosyl]oxy]-1-oxopentyl]amino]propyl]amino] -3-oxopropoxy]methyl]-1,12,19,25-tetraoxo-16-oxa-13,20,24-t riazanonacos-1-yl]-4-hydroxy-2-pyrrolidinyl)methyl ester
tttcccgctctcagagtctta

SEQ ID NO: 952 - RNA, 23 nt, synthetic construct
  source 1..23: mol_type = other RNA
  modified_base 1: mod_base = OTHER; note = 2'-O-methyluridine-3'-phosphorothioate 5'-(E)-Vinylphosphonate
  modified_base 2: mod_base = OTHER; note = 2'-deoxy-2'-fluoroadenosine-3'-phosphorothioate
  modified_base 3: mod_base = OTHER; note = 2'-O-methyladenosine-3'-phosphate
  modified_base 4: mod_base = OTHER; note = 2'-O-methylguanosine-3'-phosphate
  modified_base 5: mod_base = OTHER; note = 2'-O-methyladenosine-3'-phosphate
  modified_base 6: mod_base = OTHER; note = 2'-deoxy-2'-fluorocytidine-3'-phosphate
  modified_base 7: mod_base = OTHER; note = 2'-O-methyluridine-3'-phosphate
  modified_base 8: mod_base = OTHER; note = 2'-deoxy-2'-fluorocytidine-3'-phosphate
  modified_base 9: mod_base = OTHER; note = 2'-deoxy-2'-fluorouridine-3'-phosphate
  modified_base 10: mod_base = OTHER; note = 2'-O-methylguanosine-3'-phosphate
  modified_base 11: mod_base = OTHER; note = 2'-O-methyladenosine-3'-phosphate
  modified_base 12: mod_base = OTHER; note = 2'-O-methylguanosine-3'-phosphate
  modified_base 13: mod_base = OTHER; note = 2'-O-methyladenosine-3'-phosphate
  modified_base 14: mod_base = OTHER; note = 2'-deoxy-2'-fluoroguanosine-3'-phosphate
  modified_base 15: mod_base = OTHER; note = 2'-O-methylcytidine-3'-phosphate
  modified_base 16: mod_base = OTHER; note = 2'-deoxy-2'-fluoroguanosine-3'-phosphate
  modified_base 17: mod_base = OTHER; note = 2'-O-methylguanosine-3'-phosphate
  modified_base 18: mod_base = OTHER; note = 2'-O-methylguanosine-3'-phosphate
  modified_base 19: mod_base = OTHER; note = 2'-O-methyladenosine-3'-phosphate
  modified_base 20: mod_base = OTHER; note = 2'-O-methyladenosine-3'-phosphate
  modified_base 21: mod_base = OTHER; note = 2'-O-methyladenosine-3'-phosphorothioate
  modified_base 22: mod_base = OTHER; note = 2'-O-methylguanosine-3'-phosphorothioate
  modified_base 23: mod_base = OTHER; note = 2'-O-methylguanosine
taagactctgagagcgggaaagg

SEQ ID NO: 953 - RNA, 21 nt, synthetic construct
  source 1..21: mol_type = other RNA
  modified_base 1: mod_base = OTHER; note = 2'-O-methylcytidine-3'-phosphorothioate
  modified_base 2: mod_base = OTHER; note = 2'-O-methyladenosine-3'-phosphorothioate
  modified_base 3: mod_base = OTHER; note = 2'-O-methylguanosine-3'-phosphate
  modified_base 4: mod_base = OTHER; note = 2'-O-methyluridine-3'-phosphate
  modified_base 5: mod_base = OTHER; note = 2'-O-methylguanosine-3'-phosphate
  modified_base 6: mod_base = OTHER; note = 2'-O-methyladenosine-3'-phosphate
  modified_base 7: mod_base = OTHER; note = 2'-deoxy-2'-fluorocytidine-3'-phosphate
  modified_base 8: mod_base = OTHER; note = 2'-O-methylcytidine-3'-phosphate
  modified_base 9: mod_base = OTHER; note = 2'-deoxy-2'-fluorouridine-3'-phosphate
  modified_base 10: mod_base = OTHER; note = 2'-deoxy-2'-fluorouridine-3'-phosphate
  modified_base 11: mod_base = OTHER; note = 2'-deoxy-2'-fluorouridine-3'-phosphate
  modified_base 12: mod_base = OTHER; note = 2'-O-methylcytidine-3'-phosphate
  modified_base 13: mod_base = OTHER; note = 2'-O-methylcytidine-3'-phosphate
  modified_base 14: mod_base = OTHER; note = 2'-O-methylcytidine-3'-phosphate
  modified_base 15: mod_base = OTHER; note = 2'-O-methylguanosine-3'-phosphate
  modified_base 16: mod_base = OTHER; note = 2'-O-methylcytidine-3'-phosphate
  modified_base 17: mod_base = OTHER; note = 2'-O-methyluridine-3'-phosphate
  modified_base 18: mod_base = OTHER; note = 2'-O-methylcytidine-3'-phosphate
  modified_base 19: mod_base = OTHER; note = 2'-O-methyluridine-3'-phosphate
  modified_base 20: mod_base = OTHER; note = 2'-O-methylcytidine-3'-phosphate
  modified_base 21: mod_base = OTHER; note = 2'-O-methyladenosine-3'-phosphate ((2S,4R)-1-[29-[[2-(acetylamino)-2-deoxy-beta-D-galactopyra nosyl]oxy]-14,14-bis[[3-[[3-[[5-[[2-(acetylamino)-2-deoxy-b eta-D-galactopyranosyl]oxy]-1-oxopentyl]amino]propyl]amino] -3-oxopropoxy]methyl]-1,12,19,25-tetraoxo-16-oxa-13,20,24-t riazanonacos-1-yl]-4-hydroxy-2-pyrrolidinyl)methyl ester
cagtgacctttcccgctctca

SEQ ID NO: 954 - RNA, 23 nt, synthetic construct
  source 1..23: mol_type = other RNA
  modified_base 1: mod_base = OTHER; note = 2'-O-methyluridine-3'-phosphorothioate 5'-(E)-Vinylphosphonate
  modified_base 2: mod_base = OTHER; note = 2'-deoxy-2'-fluoroguanosine-3'-phosphorothioate
  modified_base 3: mod_base = OTHER; note = 2'-O-methyladenosine-3'-phosphate
  modified_base 4: mod_base = OTHER; note = 2'-O-methylguanosine-3'-phosphate
  modified_base 5: mod_base = OTHER; note = 2'-O-methyladenosine-3'-phosphate
  modified_base 6: mod_base = OTHER; note = 2'-deoxy-2'-fluoroguanosine-3'-phosphate
  modified_base 7: mod_base = OTHER; note = 2'-O-methylcytidine-3'-phosphate
  modified_base 8: mod_base = OTHER; note = 2'-deoxy-2'-fluoroguanosine-3'-phosphate
  modified_base 9: mod_base = OTHER; note = 2'-deoxy-2'-fluoroguanosine-3'-phosphate
  modified_base 10: mod_base = OTHER; note = 2'-O-methylguanosine-3'-phosphate
  modified_base 11: mod_base = OTHER; note = 2'-O-methyladenosine-3'-phosphate
  modified_base 12: mod_base = OTHER; note = 2'-O-methyladenosine-3'-phosphate
  modified_base 13: mod_base = OTHER; note = 2'-O-methyladenosine-3'-phosphate
  modified_base 14: mod_base = OTHER; note = 2'-deoxy-2'-fluoroguanosine-3'-phosphate
  modified_base 15: mod_base = OTHER; note = 2'-O-methylguanosine-3'-phosphate
  modified_base 16: mod_base = OTHER; note = 2'-deoxy-2'-fluorouridine-3'-phosphate
  modified_base 17: mod_base = OTHER; note = 2'-O-methylcytidine-3'-phosphate
  modified_base 18: mod_base = OTHER; note = 2'-O-methyladenosine-3'-phosphate
  modified_base 19: mod_base = OTHER; note = 2'-O-methylcytidine-3'-phosphate
  modified_base 20: mod_base = OTHER; note = 2'-O-methyluridine-3'-phosphate
  modified_base 21: mod_base = OTHER; note = 2'-O-methylguanosine-3'-phosphorothioate
  modified_base 22: mod_base = OTHER; note = 2'-O-methyluridine-3'-phosphorothioate
  modified_base 23: mod_base = OTHER; note = 2'-O-methyladenosine
tgagagcgggaaaggtcactgta

SEQ ID NO: 955 - RNA, 21 nt, synthetic construct
  source 1..21: mol_type = other RNA
  modified_base 1: mod_base = OTHER; note = 2'-O-methylcytidine-3'-phosphorothioate
  modified_base 2: mod_base = OTHER; note = 2'-O-methyladenosine-3'-phosphorothioate
  modified_base 3: mod_base = OTHER; note = 2'-O-methyladenosine-3'-phosphate
  modified_base 4: mod_base = OTHER; note = 2'-O-methyladenosine-3'-phosphate
  modified_base 5: mod_base = OTHER; note = 2'-O-methyladenosine-3'-phosphate
  modified_base 6: mod_base = OTHER; note = 2'-O-methylguanosine-3'-phosphate
  modified_base 7: mod_base = OTHER; note = 2'-deoxy-2'-fluorouridine-3'-phosphate
  modified_base 8: mod_base = OTHER; note = 2'-O-methylcytidine-3'-phosphate
  modified_base 9: mod_base = OTHER; note = 2'-deoxy-2'-fluoroadenosine-3'-phosphate
  modified_base 10: mod_base = OTHER; note = 2'-deoxy-2'-fluorocytidine-3'-phosphate
  modified_base 11: mod_base = OTHER; note = 2'-deoxy-2'-fluoroadenosine-3'-phosphate
  modified_base 12: mod_base = OTHER; note = 2'-O-methylguanosine-3'-phosphate
  modified_base 13: mod_base = OTHER; note = 2'-O-methyluridine-3'-phosphate
  modified_base 14: mod_base = OTHER; note = 2'-O-methylcytidine-3'-phosphate
  modified_base 15: mod_base = OTHER; note = 2'-O-methylcytidine-3'-phosphate
  modified_base 16: mod_base = OTHER; note = 2'-O-methylguanosine-3'-phosphate
  modified_base 17: mod_base = OTHER; note = 2'-O-methyluridine-3'-phosphate
  modified_base 18: mod_base = OTHER; note = 2'-O-methylguanosine-3'-phosphate
  modified_base 19: mod_base = OTHER; note = 2'-O-methylguanosine-3'-phosphate
  modified_base 20: mod_base = OTHER; note = 2'-O-methyluridine-3'-phosphate
  modified_base 21: mod_base = OTHER; note = 2'-O-methyladenosine-3'-phosphate ((2S,4R)-1-[29-[[2-(acetylamino)-2-deoxy-beta-D-galactopyra nosyl]oxy]-14,14-bis[[3-[[3-[[5-[[2-(acetylamino)-2-deoxy-b eta-D-galactopyranosyl]oxy]-1-oxopentyl]amino]propyl]amino] -3-oxopropoxy]methyl]-1,12,19,25-tetraoxo-16-oxa-13,20,24-t riazanonacos-1-yl]-4-hydroxy-2-pyrrolidinyl)methyl ester
caaaagtcacagtccgtggta

SEQ ID NO: 956 - RNA, 23 nt, synthetic construct
  source 1..23: mol_type = other RNA
  modified_base 1: mod_base = OTHER; note = 2'-O-methyluridine-3'-phosphorothioate 5'-(E)-Vinylphosphonate
  modified_base 2: mod_base = OTHER; note = 2'-deoxy-2'-fluoroadenosine-3'-phosphorothioate
  modified_base 3: mod_base = OTHER; note = 2'-O-methylcytidine-3'-phosphate
  modified_base 4: mod_base = OTHER; note = 2'-O-methylcytidine-3'-phosphate
  modified_base 5: mod_base = OTHER; note = 2'-O-methyladenosine-3'-phosphate
  modified_base 6: mod_base = OTHER; note = 2'-deoxy-2'-fluorocytidine-3'-phosphate
  modified_base 7: mod_base = OTHER; note = 2'-O-methylguanosine-3'-phosphate
  modified_base 8: mod_base = OTHER; note = 2'-deoxy-2'-fluoroguanosine-3'-phosphate
  modified_base 9: mod_base = OTHER; note = 2'-deoxy-2'-fluoroadenosine-3'-phosphate
  modified_base 10: mod_base = OTHER; note = 2'-O-methylcytidine-3'-phosphate
  modified_base 11: mod_base = OTHER; note = 2'-O-methyluridine-3'-phosphate
  modified_base 12: mod_base = OTHER; note = 2'-O-methylguanosine-3'-phosphate
  modified_base 13: mod_base = OTHER; note = 2'-O-methyluridine-3'-phosphate
  modified_base 14: mod_base = OTHER; note = 2'-deoxy-2'-fluoroguanosine-3'-phosphate
  modified_base 15: mod_base = OTHER; note = 2'-O-methyladenosine-3'-phosphate
  modified_base 16: mod_base = OTHER; note = 2'-deoxy-2'-fluorocytidine-3'-phosphate
  modified_base 17: mod_base = OTHER; note = 2'-O-methyluridine-3'-phosphate
  modified_base 18: mod_base = OTHER; note = 2'-O-methyluridine-3'-phosphate
  modified_base 19: mod_base = OTHER; note = 2'-O-methyluridine-3'-phosphate
  modified_base 20: mod_base = OTHER; note = 2'-O-methyluridine-3'-phosphate
  modified_base 21: mod_base = OTHER; note = 2'-O-methylguanosine-3'-phosphorothioate
  modified_base 22: mod_base = OTHER; note = 2'-O-methyladenosine-3'-phosphorothioate
  modified_base 23: mod_base = OTHER; note = 2'-O-methyluridine
taccacggactgtgacttttgat

SEQ ID NO: 957 - RNA, 21 nt, synthetic construct
  source 1..21: mol_type = other RNA
  modified_base 1: mod_base = OTHER; note = 2'-O-methyluridine-3'-phosphorothioate
  modified_base 2: mod_base = OTHER; note = 2'-O-methyluridine-3'-phosphorothioate
  modified_base 3: mod_base = OTHER; note = 2'-O-methylcytidine-3'-phosphate
  modified_base 4: mod_base = OTHER; note = 2'-O-methylcytidine-3'-phosphate
  modified_base 5: mod_base = OTHER; note = 2'-O-methylcytidine-3'-phosphate
  modified_base 6: mod_base = OTHER; note = 2'-O-methylguanosine-3'-phosphate
  modified_base 7: mod_base = OTHER; note = 2'-deoxy-2'-fluorocytidine-3'-phosphate
  modified_base 8: mod_base = OTHER; note = 2'-O-methyluridine-3'-phosphate
  modified_base 9: mod_base = OTHER; note = 2'-deoxy-2'-fluorocytidine-3'-phosphate
  modified_base 10: mod_base = OTHER; note = 2'-deoxy-2'-fluorouridine-3'-phosphate
  modified_base 11: mod_base = OTHER; note = 2'-deoxy-2'-fluorocytidine-3'-phosphate
  modified_base 12: mod_base = OTHER; note = 2'-O-methyladenosine-3'-phosphate
  modified_base 13: mod_base = OTHER; note = 2'-O-methylguanosine-3'-phosphate
  modified_base 14: mod_base = OTHER; note = 2'-O-methyladenosine-3'-phosphate
  modified_base 15: mod_base = OTHER; note = 2'-O-methylguanosine-3'-phosphate
  modified_base 16: mod_base = OTHER; note = 2'-O-methyluridine-3'-phosphate
  modified_base 17: mod_base = OTHER; note = 2'-O-methylcytidine-3'-phosphate
  modified_base 18: mod_base = OTHER; note = 2'-O-methyluridine-3'-phosphate
  modified_base 19: mod_base = OTHER; note = 2'-O-methyluridine-3'-phosphate
  modified_base 20: mod_base = OTHER; note = 2'-O-methyluridine-3'-phosphate
  modified_base 21: mod_base = OTHER; note = 2'-O-methyladenosine-3'-phosphate ((2S,4R)-1-[29-[[2-(acetylamino)-2-deoxy-beta-D-galactopyra nosyl]oxy]-14,14-bis[[3-[[3-[[5-[[2-(acetylamino)-2-deoxy-b eta-D-galactopyranosyl]oxy]-1-oxopentyl]amino]propyl]amino] -3-oxopropoxy]methyl]-1,12,19,25-tetraoxo-16-oxa-13,20,24-t riazanonacos-1-yl]-4-hydroxy-2-pyrrolidinyl)methyl ester
ttcccgctctcagagtcttta

SEQ ID NO: 958 - RNA, 23 nt, synthetic construct
  source 1..23: mol_type = other RNA
  modified_base 1: mod_base = OTHER; note = 2'-O-methyluridine-3'-phosphorothioate 5'-(E)-Vinylphosphonate
  modified_base 2: mod_base = OTHER; note = 2'-deoxy-2'-fluoroadenosine-3'-phosphorothioate
  modified_base 3: mod_base = OTHER; note = 2'-O-methyladenosine-3'-phosphate
  modified_base 4: mod_base = OTHER; note = 2'-O-methyladenosine-3'-phosphate
  modified_base 5: mod_base = OTHER; note = 2'-O-methylguanosine-3'-phosphate
  modified_base 6: mod_base = OTHER; note = 2'-deoxy-2'-fluoroadenosine-3'-phosphate
  modified_base 7: mod_base = OTHER; note = 2'-O-methylcytidine-3'-phosphate
  modified_base 8: mod_base = OTHER; note = 2'-deoxy-2'-fluorouridine-3'-phosphate
  modified_base 9: mod_base = OTHER; note = 2'-deoxy-2'-fluorocytidine-3'-phosphate
  modified_base 10: mod_base = OTHER; note = 2'-O-methyluridine-3'-phosphate
  modified_base 11: mod_base = OTHER; note = 2'-O-methylguanosine-3'-phosphate
  modified_base 12: mod_base = OTHER; note = 2'-O-methyladenosine-3'-phosphate
  modified_base 13: mod_base = OTHER; note = 2'-O-methylguanosine-3'-phosphate
  modified_base 14: mod_base = OTHER; note = 2'-deoxy-2'-fluoroadenosine-3'-phosphate
  modified_base 15: mod_base = OTHER; note = 2'-O-methylguanosine-3'-phosphate
  modified_base 16: mod_base = OTHER; note = 2'-deoxy-2'-fluorocytidine-3'-phosphate
  modified_base 17: mod_base = OTHER; note = 2'-O-methylguanosine-3'-phosphate
  modified_base 18: mod_base = OTHER; note = 2'-O-methylguanosine-3'-phosphate
  modified_base 19: mod_base = OTHER; note = 2'-O-methylguanosine-3'-phosphate
  modified_base 20: mod_base = OTHER; note = 2'-O-methyladenosine-3'-phosphate
  modified_base 21: mod_base = OTHER; note = 2'-O-methyladenosine-3'-phosphorothioate
  modified_base 22: mod_base = OTHER; note = 2'-O-methyladenosine-3'-phosphorothioate
  modified_base 23: mod_base = OTHER; note = 2'-O-methylguanosine
taaagactctgagagcgggaaag

SEQ ID NO: 959 - RNA, 21 nt, synthetic construct
  source 1..21: mol_type = other RNA
  modified_base 1: mod_base = OTHER; note = 2'-O-methyladenosine-3'-phosphorothioate
  modified_base 2: mod_base = OTHER; note = 2'-O-methyladenosine-3'-phosphorothioate
  modified_base 3: mod_base = OTHER; note = 2'-O-methyluridine-3'-phosphate
  modified_base 4: mod_base = OTHER; note = 2'-O-methylcytidine-3'-phosphate
  modified_base 5: mod_base = OTHER; note = 2'-O-methyladenosine-3'-phosphate
  modified_base 6: mod_base = OTHER; note = 2'-O-methyladenosine-3'-phosphate
  modified_base 7: mod_base = OTHER; note = 2'-deoxy-2'-fluoroadenosine-3'-phosphate
  modified_base 8: mod_base = OTHER; note = 2'-O-methyladenosine-3'-phosphate
  modified_base 9: mod_base = OTHER; note = 2'-deoxy-2'-fluoroguanosine-3'-phosphate
  modified_base 10: mod_base = OTHER; note = 2'-deoxy-2'-fluorouridine-3'-phosphate
  modified_base 11: mod_base = OTHER; note = 2'-deoxy-2'-fluorocytidine-3'-phosphate
  modified_base 12: mod_base = OTHER; note = 2'-O-methyladenosine-3'-phosphate
  modified_base 13: mod_base = OTHER; note = 2'-O-methylcytidine-3'-phosphate
  modified_base 14: mod_base = OTHER; note = 2'-O-methyladenosine-3'-phosphate
  modified_base 15: mod_base = OTHER; note = 2'-O-methylguanosine-3'-phosphate
  modified_base 16: mod_base = OTHER; note = 2'-O-methyluridine-3'-phosphate
  modified_base 17: mod_base = OTHER; note = 2'-O-methylcytidine-3'-phosphate
  modified_base 18: mod_base = OTHER; note = 2'-O-methylcytidine-3'-phosphate
  modified_base 19: mod_base = OTHER; note = 2'-O-methylguanosine-3'-phosphate
  modified_base 20: mod_base = OTHER; note = 2'-O-methyluridine-3'-phosphate
  modified_base 21: mod_base = OTHER; note = 2'-O-methyladenosine-3'-phosphate ((2S,4R)-1-[29-[[2-(acetylamino)-2-deoxy-beta-D-galactopyra nosyl]oxy]-14,14-bis[[3-[[3-[[5-[[2-(acetylamino)-2-deoxy-b eta-D-galactopyranosyl]oxy]-1-oxopentyl]amino]propyl]amino] -3-oxopropoxy]methyl]-1,12,19,25-tetraoxo-16-oxa-13,20,24-t riazanonacos-1-yl]-4-hydroxy-2-pyrrolidinyl)methyl ester
aatcaaaagtcacagtccgta

SEQ ID NO: 960 - RNA, 23 nt, synthetic construct
  source 1..23: mol_type = other RNA
  modified_base 1: mod_base = OTHER; note = 2'-O-methyluridine-3'-phosphorothioate 5'-(E)-Vinylphosphonate
  modified_base 2: mod_base = OTHER; note = 2'-deoxy-2'-fluoroadenosine-3'-phosphorothioate
  modified_base 3: mod_base = OTHER; note = 2'-O-methylcytidine-3'-phosphate
  modified_base 4: mod_base = OTHER; note = 2'-O-methylguanosine-3'-phosphate
  modified_base 5: mod_base = OTHER; note = 2'-O-methylguanosine-3'-phosphate
  modified_base 6: mod_base = OTHER; note = 2'-deoxy-2'-fluoroadenosine-3'-phosphate
  modified_base 7: mod_base = OTHER; note = 2'-O-methylcytidine-3'-phosphate
  modified_base 8: mod_base = OTHER; note = 2'-deoxy-2'-fluorouridine-3'-phosphate
  modified_base 9: mod_base = OTHER; note = 2'-deoxy-2'-fluoroguanosine-3'-phosphate
  modified_base 10: mod_base = OTHER; note = 2'-O-methyluridine-3'-phosphate
  modified_base 11: mod_base = OTHER; note = 2'-O-methylguanosine-3'-phosphate
  modified_base 12: mod_base = OTHER; note = 2'-O-methyladenosine-3'-phosphate
  modified_base 13: mod_base = OTHER; note = 2'-O-methylcytidine-3'-phosphate
  modified_base 14: mod_base = OTHER; note = 2'-deoxy-2'-fluorouridine-3'-phosphate
  modified_base 15: mod_base = OTHER; note = 2'-O-methyluridine-3'-phosphate
  modified_base 16: mod_base = OTHER; note = 2'-deoxy-2'-fluorouridine-3'-phosphate
  modified_base 17: mod_base = OTHER; note = 2'-O-methyluridine-3'-phosphate
  modified_base 18: mod_base = OTHER; note = 2'-O-methylguanosine-3'-phosphate
  modified_base 19: mod_base = OTHER; note = 2'-O-methyladenosine-3'-phosphate
  modified_base 20: mod_base = OTHER; note = 2'-O-methyluridine-3'-phosphate
  modified_base 21: mod_base = OTHER; note = 2'-O-methyluridine-3'-phosphorothioate
  modified_base 22: mod_base = OTHER; note = 2'-O-methylguanosine-3'-phosphorothioate
  modified_base 23: mod_base = OTHER; note = 2'-O-methyluridine
tacggactgtgacttttgattgt

1. (canceled)

2. A double stranded ribonucleic acid (RNAi) agent for inhibiting expression of a serum amyloid P component (APCS) gene, comprising
a sense strand and an antisense strand forming a double stranded region,
wherein the antisense strand comprises at least contiguous nucleotides differing by no more than 3 nucleotides from any one of the antisense sequences listed in any one of Tables 3A, 3B, 4A, 4B, 6, and 7.

3.-12. (canceled)

13. The double stranded RNAi agent of claim 2, wherein at least one nucleotide of the said RNAi agent comprises a nucleotide modification.

14. (canceled)

15. The double stranded RNAi agent of claim 2, wherein all of the nucleotides of the sense strand and all of the nucleotides of the antisense strand comprise a nucleotide modification.

16. (canceled)

17. (canceled)

18. The double stranded RNAi agent of claim 13, further comprising at least one phosphorothioate internucleotide linkage.

19. The double stranded RNAi agent of claim 1, wherein the region of complementarity between said sense strand and said antisense strand is at least 17 nucleotides in length; 19 to 30 nucleotides in length: 21 nucleotides in length; 21 to 23 nucleotides in length; or 19 nucleotides in length.

20.-23. (canceled)

24. The double stranded RNAi agent of claim 1, wherein each strand is no more than 30 nucleotides in length; each strand is independently 19-30 nucleotides in length; or each strand is independently 19-25 nucleotides in length.

25. (canceled)

26. (canceled)

27. The double stranded RNAi agent of claim 24, wherein the sense strand is 21 nucleotides in length and the antisense strand is 23 nucleotides in length.

28. The double stranded RNAi agent of claim 1, wherein at least one strand comprises a 3′ overhang of at least 1 nucleotide; or a 3′ overhang of at least 2 nucleotides.

29. (canceled)

30. The double stranded RNAi agent of claim 1, further comprising a ligand.

31. (canceled)

32. The double stranded RNAi agent of claim 30, wherein the ligand is an N-acetylgalactosamine (GalNAc) derivative.

33. The double stranded RNAi agent of claim 32, wherein the ligand is

[chemical structure]

34. The double stranded RNAi agent of claim 33, wherein the double stranded RNAi agent is conjugated to the ligand as shown in the following schematic [chemical structure]
and wherein X is O or S.

35. The double stranded RNAi agent of claim 34, wherein the X is O.

36. (canceled)

37. A cell containing the double stranded RNAi agent of claim 1.

38. (canceled)

39. A pharmaceutical composition for inhibiting expression of a serum amyloid P component (APCS) gene comprising the double stranded RNAi agent of claim 1.

40.-44. (canceled)

45. A method of inhibiting expression of a serum amyloid P component (APCS) gene in a cell, the method comprising contacting the cell with the double stranded RNAi agent of claim 1, thereby inhibiting expression of the APCS gene in the cell.

46.-50. (canceled)

51. A method of treating a subject having a disease that would benefit from reduction in serum amyloid P component (APCS) gene expression, comprising administering to the subject a therapeutically effective amount of the double stranded RNAi agent of claim 1, thereby treating said subject.

52.-62. (canceled)

63. A method of inhibiting the expression of an APCS protein (SAP) in a subject, the method comprising
administering to said subject a therapeutically effective amount of the double stranded RNAi agent of claim 1, thereby inhibiting the expression of APCS in said subject.
